(19) United States
(12) Patent Application Publication
(10) Pub. No.: US 2010/0074864 A1
(43) Pub. Date: Mar. 25, 2010

(54) METHODS AND KITS FOR PREDICTING PROGNOSIS OF MULTIPLE SCLEROSIS

(75) Inventors: Anat Achiron, Tel -Aviv (IL); Michael Gurevich, Rechovot (IL)

Correspondence Address: MARTIN D. MOYNIHAN d/b/a PRTSI, INC., P.O. BOX 16446, ARLINGTON, VA, 22215, US

(73) Assignee: TEL HASHOMER MEDICAL RESEARCH INFRASTRUCTURE AND S, Ramat-Gan (IL)

(21) Appl. No.: 12/448,652

(22) PCT Filed: Dec. 27, 2007
(86) PCT No.: PCT/IL2007/001617

§ 371 Date: Dec. 3, 2009

Related U.S. Application Data
(60) Provisional application No. 60/877,680, filed on Dec. 29, 2006.

(51) Int. Cl. A61K 38/21; C12Q 1/68; C40B 40/06; A61P 37/00

(52) U.S. Cl. 424/85.6; 435/6; 506/16

(57) ABSTRACT

Provided are methods and kits for predicting the prognosis of a subject diagnosed with multiple sclerosis by determining the expression level of polynucleotides which are differentially expressed between subjects diagnosed with multiple sclerosis and having good or poor clinical outcome. Also provided are methods and kits for selecting a treatment regimen of a subject diagnosed with multiple sclerosis.

### FIELD AND BACKGROUND OF THE INVENTION

[0001] The present invention, in some embodiments thereof, relates to genetic markers which are differentially expressed between multiple sclerosis patients having good or poor clinical outcome, and, more particularly, but not exclusively, to methods and kits using same for predicting the prognosis and selecting treatment regimen for multiple sclerosis.

[0002] Multiple sclerosis (MS) is the most common demyelinating disease of the central nervous system (CNS) affecting young adults (disease onset between 20 to 40 years of age) and is the third leading cause for disability after trauma and rheumatic diseases. MS disease prevalence in USA is 120/100,000 (250,000 to 350,000 cases) and in Israel about 30/100,000. The main pathologic finding in MS is the presence of infiltrating mononuclear cells, predominantly T lymphocytes and macrophages, that surpass the blood brain barrier and induce an active inflammation within the brain and spinal cord, attacking the myelin and resulting in gliotic scars and axonal loss. Thus, the multiple inflammatory foci, plaques of demyelination, gliosis and axonal pathology within the brain and spinal cord contribute to the clinical manifestations of neurological disability. The acute and chronic inflammatory processes can be visualized by brain and spinal cord MRI as hyperintense T2 or hypointense T1 lesions.

[0003] The etiology of MS is not fully understood. The disease develops in genetically predisposed subjects exposed to yet undefined environmental factors and the pathogenesis involves autoimmune mechanisms associated with autoreactive T cells against myelin antigens. It is well established that not one dominant gene determines genetic susceptibility to develop MS, but rather many genes, each with different influence, are involved. The initial pathogenic process that triggers the disease might be caused by one group of genes, while other groups are probably involved in disease activity and progression (5, 6).

[0004] MS is subdivided into several clinical subtypes; when it first presents by new onset of neurological symptoms affecting the CNS and accompanied by demyelinating lesions on brain magnetic resonance imaging (MRI), it is defined as probable MS. A diagnosis of relapsing-remitting (RRMS) definite MS is made when a subject defined as probable MS experiences a second neurological attack. The course of RRMS, which occurs in 85% of patients, is characterized by attacks during which new neurological symptoms and signs appear, or existing neurological symptoms and signs worsen. Usually an attack develops within a period of several days, lasts for 6-8 weeks, and then gradually resolves. During an acute attack, scattered inflammatory and demyelinating CNS lesions produce varying combinations of motor, sensory, coordination, visual, and cognitive impairments, as well as symptoms of fatigue and urinary tract dysfunction. The outcome of an attack is unpredictable in terms of neurological squeal, but it is well established that with each attack, the probability of complete clinical remission decreases, and neurological disability and handicap are liable to develop. In about 15% of patients the disease has a primary progressive course, characterized by gradual onset of neurological symptoms that progress over time, without any attacks. This course appears mostly in patients with disease onset above the age of 40 years and more often in males. The only course of MS in which treatment was effectively established is RRMS. Various immunomodulatory drugs have been shown to reduce the number and severity of acute attacks, and thereby to decrease the accumulation of neurological disability.

[0005] Prediction of clinical outcome in MS was reported to relate to different clinical variables such as age at disease onset, gender, and the type of neurological symptomatology presented at onset. Thus, it was suggested that onset age below 35 years, rapid development and regression of initial symptoms, a single symptom at onset, and visual loss as the initial symptom, predicts a good prognosis. On the other hand, the major clinical determinants of more severe disease are male sex, relatively older age at onset, motor or cerebellar symptoms at onset and high annual relapse rate. Brain MRI parameters have also been implicated as important in the evaluation of MS course by measuring disease load over time. Brain atrophy was reported to account for more variance than lesion burden in predicting cognitive impairment. However, all these clinical and radiological variables are limited in the ability to predict disease outcome especially during early stages of the disease. This uncertainty in forecasting disease outcome means that some MS patients who need aggressive treatment do not receive it, while others are unnecessarily treated and as a result are exposed to the risk of side effects without a sound rationale. While peripheral blood genome scale analyses were used to diagnose MS and characterize MS patients in acute relapse or remission (PCT Pub. No. WO03081201A2, EP1532268A2, AU3214604AH, US20060003327A1 to the present inventors; Achiron A, et al., 2004), to date, there are no available genetic markers which can predict the clinical outcome of multiple sclerosis.

### SUMMARY OF THE INVENTION

[0006] According to an aspect of some embodiments of the present invention there is provided a method of predicting a prognosis of a subject diagnosed with multiple sclerosis, the method comprising determining in a cell of the subject a level of expression of at least one polynucleotide sequence selected from the group consisting of SEQ ID NOs:158, 68, 5, 58, 329, 120, 380, 342, 88, 166, 266, 51, 310, 91, 427, 22, 84, 269, 388, 155, 333, 215, 195, 419, 75, 125, 11, 251, 253, 337, 110, 222, 56, 324, 156, 7, 57, 233, 149, 363, 107, 193, 393, 265, 160, 41, 38, 90, 70, 85, 403, 304, 426, 240, 49, 294, 136, 150, 232, 10, 392, 89, 332, 290, 422, 291, 114, 309, 203, 362, 397, 334, 302, 179, 171, 53, 402, 315, 271, 218, 154, 243, 211, 180, 412, 300, 131, 71, 398, 289, 371, 118, 220, 82, 42, 430, 64, 144, 2, 205, 405, 318, 146, 314, 12, 416, 267, 105, 353, 296, 224, 165, 113, 345, 387, 61, 250, 59, 235, 382, 143, 361, 372, 199, 79, 116, 162, 322, 354, 391, 377, 255, 270, 373, 104, 400, 67, 167, 423, 188, 182, 106, 54, 326, 164, 307, 383, 260, 340, 357, 390, 161, 6, 316, 272, 338, 241, 367, 379, 40, 381, 231, 39, 256, 286, 8, 151, 399, 33, 254, 295, 141, 429, 65, 229, 259, 355, 298, 173, 371, 86, 45, 305, 127, 133, 200, 313, 370, 112, 226, 249, 80, 299, 196, 27, 308, 288, 349, 108, 311, 14, 130, 285, 207, 365, 275, 284, 96, 172, 76, 279, 413, 351, 202, 37, 74, 375, 360, 170, 147, 151, 306, 366, 217, 394, 192, 341, 352, 83, 157, 122, 350, 30, 25, 260, 238, 428, 278, 252, 395, 343, 325, 31, 386, 301, 317, 29, 407, 72, 283, 227, 191, 126, 132, 187, 94, 66, 109, 46, 212, 24, 69, 425, 1, 347, 197, 263, 273, 344, 181, 177, 356, 257, 148, 244, 13, 73, 420, 36, 236, 210, 43, 174, 121, 138, 87, 194, 389, 44, 396, 184, 408, 242, 152, 47, 268, 128, 230, 225, 431, 60, 206, 424, 378, 358, 262, 246, 98, 320, 117, 401, 404, 264, 34, 303, 369, 92, 277, 93, 293, 153, 142, 16, 359, 406, 425, 327, 321, 204, 384, 175, 331, 297, 410, 111, 209, 101, 335, 213, 234, 178, 124, 336, 414, 19, 319, 418, 376, 411, 421, 348, 81, 374, 140, 62, 20, 168, 129, 415, 312, 282, 370, 28, 214, 223, 364, 119, 95, 228, 339, 97, 9, 102, 276, 417, 346, 258, 328, 183, 208, 135, 23, 15, 185, 292, 287, 186, 201, 35, 239, 21, 368, 221, 115, 3, 52, 17, 409, 48, 190, 385, 63, 99, 330, 78, 159, 100, 145, 123, 245, 134, 198, 189, 139, 176, 169, 323, 4, 55, 77, 32, 274, 50, 281, 163, 219, 52, 237, 261, 216, 103,

wherein an alteration above a predetermined threshold in the level of expression of the at least one polynucleotide sequence in the cell of the subject relative to a level of expression of the at least one polynucleotide sequence in a reference cell is indicative of the prognosis of the subject diagnosed with multiple sclerosis.

[0007] According to an aspect of some embodiments of the present invention there is provided a method of treating of a subject diagnosed with multiple sclerosis, the method comprising: (a) determining in a cell of the subject a level of expression of at least one polynucleotide sequence selected from the group consisting of SEQ ID NOs:158, 68, 5, 58, 329, 120, 380, 342, 88, 166, 266, 51, 310, 91, 427, 22, 84, 269, 388, 155, 333, 215, 195, 419, 75, 125, 11, 251, 253, 337, 110, 222, 56, 324, 156, 7, 57, 233, 149, 363, 107, 193, 393, 265, 160, 41, 38, 90, 70, 85, 403, 304, 426, 240, 49, 294, 136, 150, 232, 10, 392, 89, 332, 290, 422, 291, 114, 309, 203, 362, 397, 334, 302, 179, 171, 53, 402, 315, 271, 218, 154, 243, 211, 180, 412, 300, 131, 71, 398, 289, 371, 118, 220, 82, 42, 430, 64, 144, 2, 205, 405, 318, 146, 314, 12, 416, 267, 105, 353, 296, 224, 165, 113, 345, 387, 61, 250, 59, 235, 382, 143, 361, 372, 199, 79, 116, 162, 322, 354, 391, 377, 255, 270, 373, 104, 400, 67, 167, 423, 188, 182, 106, 54, 326, 164, 307, 383, 260, 340, 357, 390, 161, 6, 316, 272, 338, 241, 367, 379, 40, 381, 231, 39, 256, 286, 8, 151, 399, 33, 254, 295, 141, 429, 65, 229, 259, 355, 298, 173, 371, 86, 45, 305, 127, 133, 200, 313, 370, 112, 226, 249, 80, 299, 196, 27, 308, 288, 349, 108, 311, 14, 130, 285, 207, 365, 275, 284, 96, 172, 76, 279, 413, 351, 202, 37, 74, 375, 360, 170, 147, 151, 306, 366, 217, 394, 192, 341, 352, 83, 157, 122, 350, 30, 25, 260, 238, 428, 278, 252, 395, 343, 325, 31, 386, 301, 317, 29, 407, 72, 283, 227, 191, 126, 132, 187, 94, 66, 109, 46, 212, 24, 69, 425, 1, 347, 197, 263, 273, 344, 181, 177, 356, 257, 148, 244, 13, 73, 420, 36, 236, 210, 43, 174, 121, 138, 87, 194, 389, 44, 396, 184, 408, 242, 152, 47, 268, 128, 230, 225, 431, 60, 206, 424, 378, 358, 262, 246, 98, 320, 117, 401, 404, 264, 34, 303, 369, 92, 277, 93, 293, 153, 142, 16, 359, 406, 425, 327, 321, 204, 384, 175, 331, 297, 410, 111, 209, 101, 335, 213, 234, 178, 124, 336, 414, 19, 319, 418, 376, 411, 421, 348, 81, 374, 140, 62, 20, 168, 129, 415, 312, 282, 370, 28, 214, 223, 364, 119, 95, 228, 339, 97, 9, 102, 276, 417, 346, 258, 328, 183, 208, 135, 23, 15, 185, 292, 287, 186, 201, 35, 239, 21, 368, 221, 115, 3, 52, 17, 409, 48, 190, 385, 63, 99, 330, 78, 159, 100, 145, 123, 245, 134, 198, 189, 139, 176, 169, 323, 4, 55, 77, 32, 274, 50, 281, 163, 219, 52, 237, 261, 216, 103,

wherein an alteration above a predetermined threshold in the level of expression of the at least one polynucleotide sequence in the cell of the subject relative to a level of expression of the at least one polynucleotide sequence in a reference cell is indicative of a prognosis of the subject diagnosed with multiple sclerosis; (b) selecting a treatment regimen based on the prognosis, thereby treating the subject diagnosed with multiple sclerosis.

[0008] According to an aspect of some embodiments of the present invention there is provided a kit for predicting a prognosis of a subject diagnosed with multiple sclerosis, comprising no more than 700 isolated nucleic acid sequences, wherein each of the isolated nucleic acid sequences is capable of specifically recognizing at least one polynucleotide sequence selected from the group consisting of SEQ ID NOs:158, 68, 5, 58, 329, 120, 380, 342, 88, 166, 266, 51, 310, 91, 427, 22, 84, 269, 388, 155, 333, 215, 195, 419, 75, 125, 11, 251, 253, 337, 110, 222, 56, 324, 156, 7, 57, 233, 149, 363, 107, 193, 393, 265, 160, 41, 38, 90, 70, 85, 403, 304, 426, 240, 49, 294, 136, 150, 232, 10, 392, 89, 332, 290, 422, 291, 114, 309, 203, 362, 397, 334, 302, 179, 171, 53, 402, 315, 271, 218, 154, 243, 211, 180, 412, 300, 131, 71, 398, 289, 371, 118, 220, 82, 42, 430, 64, 144, 2, 205, 405, 318, 146, 314, 12, 416, 267, 105, 353, 296, 224, 165, 113, 345, 387, 61, 250, 59, 235, 382, 143, 361, 372, 199, 79, 116, 162, 322, 354, 391, 377, 255, 270, 373, 104, 400, 67, 167, 423, 188, 182, 106, 54, 326, 164, 307, 383, 260, 340, 357, 390, 161, 6, 316, 272, 338, 241, 367, 379, 40, 381, 231, 39, 256, 286, 8, 151, 399, 33, 254, 295, 141, 429, 65, 229, 259, 355, 298, 173, 371, 86, 45, 305, 127, 133, 200, 313, 370, 112, 226, 249, 80, 299, 196, 27, 308, 288, 349, 108, 311, 14, 130, 285, 207, 365, 275, 284, 96, 172, 76, 279, 413, 351, 202, 37, 74, 375, 360, 170, 147, 151, 306, 366, 217, 394, 192, 341, 352, 83, 157, 122, 350, 30, 25, 260, 238, 428, 278, 252, 395, 343, 325, 31, 386, 301, 317, 29, 407, 72, 283, 227, 191, 126, 132, 187, 94, 66, 109, 46, 212, 24, 69, 425, 1, 347, 197, 263, 273, 344, 181, 177, 356, 257, 148, 244, 13, 73, 420, 36, 236, 210, 43, 174, 121, 138, 87, 194, 389, 44, 396, 184, 408, 242, 152, 47, 268, 128, 230, 225, 431, 60, 206, 424, 378, 358, 262, 246, 98, 320, 117, 401, 404, 264, 34, 303, 369, 92, 277, 93, 293, 153, 142, 16, 359, 406, 425, 327, 321, 204, 384, 175, 331, 297, 410, 111, 209, 101, 335, 213, 234, 178, 124, 336, 414, 19, 319, 418, 376, 411, 421, 348, 81, 374, 140, 62, 20, 168, 129, 415, 312, 282, 370, 28, 214, 223, 364, 119, 95, 228, 339, 97, 9, 102, 276, 417, 346, 258, 328, 183, 208, 135, 23, 15, 185, 292, 287, 186, 201, 35, 239, 21, 368, 221, 115, 3, 52, 17, 409, 48, 190, 385, 63, 99, 330, 78, 159, 100, 145, 123, 245, 134, 198, 189, 139, 176, 169, 323, 4, 55, 77, 32, 274, 50, 281, 163, 219, 52, 237, 261, 216, 103.

[0009] According to an aspect of some embodiments of the present invention there is provided a probeset comprising a plurality of oligonucleotides and no more than 700 oligonucleotides wherein each of the plurality of oligonucleotides is capable of specifically recognizing at least one polynucleotide sequence selected from the group consisting of SEQ ID NOs:158, 68, 5, 58, 329, 120, 380, 342, 88, 166, 266, 51, 310, 91, 427, 22, 84, 269, 388, 155, 333, 215, 195, 419, 75, 125, 11, 251, 253, 337, 110, 222, 56, 324, 156, 7, 57, 233, 149, 363, 107, 193, 393, 265, 160, 41, 38, 90, 70, 85, 403, 304, 426, 240, 49, 294, 136, 150, 232, 10, 392, 89, 332, 290, 422, 291, 114, 309, 203, 362, 397, 334, 302, 179, 171, 53, 402, 315, 271, 218, 154, 243, 211, 180, 412, 300, 131, 71, 398, 289, 371, 118, 220, 82, 42, 430, 64, 144, 2, 205, 405, 318, 146, 314, 12, 416, 267, 105, 353, 296, 224, 165, 113, 345, 387, 61, 250, 59, 235, 382, 143, 361, 372, 199, 79, 116, 162, 322, 354, 391, 377, 255, 270, 373, 104, 400, 67, 167, 423, 188, 182, 106, 54, 326, 164, 307, 383, 260, 340, 357, 390, 161, 6, 316, 272, 338, 241, 367, 379, 40, 381, 231, 39, 256, 286, 8, 151, 399, 33, 254, 295, 141, 429, 65, 229, 259, 355, 298, 173, 371, 86, 45, 305, 127, 133, 200, 313, 370, 112, 226, 249, 80, 299, 196, 27, 308, 288, 349, 108, 311, 14, 130, 285, 207, 365, 275, 284, 96, 172, 76, 279, 413, 351, 202, 37, 74, 375, 360, 170, 147, 151, 306, 366, 217, 394, 192, 341, 352, 83, 157, 122, 350, 30, 25, 260, 238, 428, 278, 252, 395, 343, 325, 31, 386, 301, 317, 29, 407, 72, 283, 227, 191, 126, 132, 187, 94, 66, 109, 46, 212, 24, 69, 425, 1, 347, 197, 263, 273, 344, 181, 177, 356, 257, 148, 244, 13, 73, 420, 36, 236, 210, 43, 174, 121, 138, 87, 194, 389, 44, 396, 184, 408, 242, 152, 47, 268, 128, 230, 225, 431, 60, 206, 424, 378, 358, 262, 246, 98, 320, 117, 401, 404, 264, 34, 303, 369, 92, 277, 93, 293, 153, 142, 16, 359, 406, 425, 327, 321, 204, 384, 175, 331, 297, 410, 111, 209, 101, 335, 213, 234, 178, 124, 336, 414, 19, 319, 418, 376, 411, 421, 348, 81, 374, 140, 62, 20, 168, 129, 415, 312, 282, 370, 28, 214, 223, 364, 119, 95, 228, 339, 97, 9, 102, 276, 417, 346, 258, 328, 183, 208, 135, 23, 15, 185, 292, 287, 186, 201, 35, 239, 21, 368, 221, 115, 3, 52, 17, 409, 48, 190, 385, 63, 99, 330, 78, 159, 100, 145, 123, 245, 134, 198, 189, 139, 176, 169, 323, 4, 55, 77, 32, 274, 50, 281, 163, 219, 52, 237, 261, 216, 103.

[0010] According to some embodiments of the invention, the kit further comprises a reference cell.

[0011] According to some embodiments of the invention, each of the isolated nucleic acid sequences or the plurality of oligonucleotides is bound to a solid support.

[0012] According to some embodiments of the invention, the plurality of oligonucleotides is bound to the solid support in an addressable location.

[0013] According to some embodiments of the invention, the reference cell is of a subject diagnosed with multiple sclerosis which displayed within a period of two years an increase of at least 0.5 point in an Expanded Disability Status Scale (EDSS).

[0014] According to some embodiments of the invention, the reference cell is of a subject diagnosed with multiple sclerosis which displayed within a period of two years no change in an Expanded Disability Status Scale (EDSS).

[0015] According to some embodiments of the invention, the alteration is upregulation of the expression level of the at least one polynucleotide sequence in the cell of the subject relative to the reference cell, whereas the at least one polynucleotide sequence is selected from the group consisting of SEQ ID NOs:1-193.

[0016] According to some embodiments of the invention, the prognosis comprises no change in an Expanded Disability Status Scale (EDSS) of the subject within a period of two years.

[0017] According to some embodiments of the invention, the prognosis further comprises no relapses within the period of the two years.

[0018] According to some embodiments of the invention, the alteration is upregulation of the expression level of the at least one polynucleotide sequence in the cell of the subject relative to the reference cell, whereas the at least one polynucleotide sequence is selected from the group consisting of SEQ ID NOs:194-431.

[0019] According to some embodiments of the invention, the prognosis comprises an increase of at least 0.5 point in an Expanded Disability Status Scale (EDSS) of the subject within a period of at least two years.

[0020] According to some embodiments of the invention, detecting the level of expression is effected using an RNA detection method.

[0021] According to some embodiments of the invention, the kit further comprising at least one reagent suitable for detecting hybridization of the isolated nucleic acid sequences and at least one RNA transcript corresponding to the at least one polynucleotide sequence selected from the group consisting of SEQ ID NOs:158, 68, 5, 58, 329, 120, 380, 342, 88, 166, 266, 51, 310, 91, 427, 22, 84, 269, 388, 155, 333, 215, 195, 419, 75, 125, 11, 251, 253, 337, 110, 222, 56, 324, 156, 7, 57, 233, 149, 363, 107, 193, 393, 265, 160, 41, 38, 90, 70, 85, 403, 304, 426, 240, 49, 294, 136, 150, 232, 10, 392, 89, 332, 290, 422, 291, 114, 309, 203, 362, 397, 334, 302, 179, 171, 53, 402, 315, 271, 218, 154, 243, 211, 180, 412, 300, 131, 71, 398, 289, 371, 118, 220, 82, 42, 430, 64, 144, 2, 205, 405, 318, 146, 314, 12, 416, 267, 105, 353, 296, 224, 165, 113, 345, 387, 61, 250, 59, 235, 382, 143, 361, 372, 199, 79, 116, 162, 322, 354, 391, 377, 255, 270, 373, 104, 400, 67, 167, 423, 188, 182, 106, 54, 326, 164, 307, 383, 260, 340, 357, 390, 161, 6, 316, 272, 338, 241, 367, 379, 40, 381, 231, 39, 256, 286, 8, 151, 399, 33, 254, 295, 141, 429, 65, 229, 259, 355, 298, 173, 371, 86, 45, 305, 127, 133, 200, 313, 370, 112, 226, 249, 80, 299, 196, 27, 308, 288, 349, 108, 311, 14, 130, 285, 207, 365, 275, 284, 96, 172, 76, 279, 413, 351, 202, 37, 74, 375, 360, 170, 147, 151, 306, 366, 217, 394, 192, 341, 352, 83, 157, 122, 350, 30, 25, 260, 238, 428, 278, 252, 395, 343, 325, 31, 386, 301, 317, 29, 407, 72, 283, 227, 191, 126, 132, 187, 94, 66, 109, 46, 212, 24, 69, 425, 1, 347, 197, 263, 273, 344, 181, 177, 356, 257, 148, 244, 13, 73, 420, 36, 236, 210, 43, 174, 121, 138, 87, 194, 389, 44, 396, 184, 408, 242, 152, 47, 268, 128, 230, 225, 431, 60, 206, 424, 378, 358, 262, 246, 98, 320, 117, 401, 404, 264, 34, 303, 369, 92, 277, 93, 293, 153, 142, 16, 359, 406, 425, 327, 321, 204, 384, 175, 331, 297, 410, 111, 209, 101, 335, 213, 234, 178, 124, 336, 414, 19, 319, 418, 376, 411, 421, 348, 81, 374, 140, 62, 20, 168, 129, 415, 312, 282, 370, 28, 214, 223, 364, 119, 95, 228, 339, 97, 9, 102, 276, 417, 346, 258, 328, 183, 208, 135, 23, 15, 185, 292, 287, 186, 201, 35, 239, 21, 368, 221, 115, 3, 52, 17, 409, 48, 190, 385, 63, 99, 330, 78, 159, 100, 145, 123, 245, 134, 198, 189, 139, 176, 169, 323, 4, 55, 77, 32, 274, 50, 281, 163, 219, 52, 237, 261, 216, 103.

[0022] According to some embodiments of the invention, the kit comprising packaging materials packaging the at least one reagent and instructions for use in determining the prognosis of the subject diagnosed with multiple sclerosis.

[0023] According to some embodiments of the invention, the multiple sclerosis is relapsing-remitting multiple sclerosis (RRMS).

[0024] According to some embodiments of the invention, the at least one polynucleotide sequence is selected from the group consisting of SEQ ID NOs:156, 143, 127, 46, 311, 140, 74, 276, 180, 182, 191, 61, 306, 115, 97, 303, 272, 50, 16, 63, 117, 406, 423, 128, 277, 47, 17, 424, 418, 190, 139, 102, 103 and 325.

[0025] According to some embodiments of the invention, the at least one polynucleotide sequence is selected from the group consisting of SEQ ID NOs:127, 423, 16, 17, 424, 190 and 325.

[0026] According to some embodiments of the invention, the at least one polynucleotide comprises the 7 polynucleotides set forth by SEQ ID NOs:127, 423, 16, 17, 424, 190 and 325.

[0027] According to some embodiments of the invention, the cell of the subject is a blood cell.

[0028] According to some embodiments of the invention, the at least one polynucleotide sequence is set forth by SEQ ID NO:158.

[0029] According to some embodiments of the invention, the at least one polynucleotide comprises the polynucleotide sequences set forth by SEQ ID NOs:158, 68, 5, 58, 329 and 120.

[0030] According to some embodiments of the invention, detecting the level of expression is effected using a protein detection method.

[0031] Unless otherwise defined, all technical and/or scientific terms used herein have the same meaning as commonly understood by one of ordinary skill in the art to which the invention pertains. Although methods and materials similar or equivalent to those described herein can be used in the practice or testing of embodiments of the invention, exemplary methods and/or materials are described below. In case of conflict, the patent specification, including definitions, will control. In addition, the materials, methods, and examples are illustrative only and are not intended to be necessarily limiting.

### BRIEF DESCRIPTION OF THE DRAWINGS

[0032] Some embodiments of the invention are herein described, by way of example only, with reference to the accompanying drawings. With specific reference now to the drawings in detail, it is stressed that the particulars shown are by way of example and for purposes of illustrative discussion of embodiments of the invention. In this regard, the description taken with the drawings makes apparent to those skilled in the art how embodiments of the invention may be practiced.

[0033] In the drawings:

[0034] FIG. 1 is a flow chart of the study design. Overview of the strategy used for the identification and validation of predictive clinical outcome gene-expression signature in RRMS using the signature support vector machine (SVM) in combination with Forward feature selection algorithm were applied (http://ro.utia.cz/fs/fs_algorithms.html), (12, 13).

[0035] FIG. 2 depicts a heatmap of 431 differentiating genes between poor and good clinical outcome of RRMS patients. Each row of the heatmap represents a gene and each column represents a patient's sample. Genes with increased expression (upregulation) are shown in progressively brighter shades of red, and genes with decreased expression (downregulation) are shown in progressively darker shades of green. The bottom matrix shows corresponding clinical outcome attributes marked in black when applicable. EDSS (Expanded Disability Status Scale) scores were determined in RRMS patients at the recruitment to study and during a two-years follow-up; EDSS 0—no change in EDSS score; Delta EDSS neg (negative)—improvement; Delta EDSS pos (positive)—deterioration; Relapse—attack;

[0036] FIG. 3 depicts a functional annotation histogram of some of the differentiating genes between poor and good clinical outcome of RRMS. Distribution of differentiating gene expression signature according to biologically relevant functional groups. Numbers represent the number of genes from the differentiating signature which belong to each functional annotation;

[0037] FIG. 4 is a graph depicting an overabundance analysis of the differentiating genes between poor and good clinical outcome of RRMS. Actual number of genes (blue line) is significantly more abundant than expected (red line) for TNoM statistical test. X-axis denotes p-value; y-axis denotes number of genes;

[0038] FIG. 5 is a graph depicting the Leave-One-Out-Cross-Validation (LOOCV) classification. Division of errors between patients with good and poor clinical outcome of RRMS using TNoM, Info and t-test demonstrated high classification rate of 90% at p<0.0001. X-axis denotes p value; y-axis denotes error rate in %.

[0039] FIG. 6 is a graph depicting the predictive classification chart of the differentiating genes between poor and good clinical outcome of RRMS. The classification rate of 29 predictive genes is demonstrated. Highest classification rate is achieved using only 7 genes, yet according to the feature selection algorithm, genes are added to the subset as long as the classification rate is not decreased. Y axis denotes classification rate; x axis denotes the number of genes;

[0040] FIG. 7 depicts gene enrichment of the differentiating genes between poor and good clinical outcome of RRMS. Direction of an over-expressed (1) or down-expressed (−1) gene is demonstrated in the enriched groups within the poor vs. good outcome signature;

[0041] FIGS. 8a-c are infograms depicting the representation of genes related to specific biological processes in the 431 probesets of the present invention (shown in FIGS. 2a-b; SEQ ID NOs:1-431) which are differentially expressed between MS subjects with good or poor clinical outcome. FIG. 8a—A matrix of gene sets vs. arrays (each array represents an MS subject), where a colored entry indicates that the genes in the gene set had significantly changed in a coordinated fashion in the respective array (red—increased, green—decreased, black—not changed) as compared to the expected number of genes in each biological process as calculated using the Genomica software (http://genomica.weizmann.ac.il). The names of the biological processes are shown on the top index and the MS subject reference numbers are shown on the right index of FIG. 8b. FIG. 8b shows individual clinical outcome attributes that each array belongs to. The clinical outcome attributes include: EDSS 0 (no change in EDSS score), delta EDSS neg (negative; improvement), delta EDSS pos (positive; deterioration), poor outcome (poor clinical outcome as determined during two years), and relapse (attack). The color index is a follows: pink=presence of parameter; white—absence of parameter. FIG. 8c—a Module map demonstrating overall clinical outcome attributes in which gene sets were significantly enriched. Red—the number of genes in the specific biological process is higher than expected; green—the number of genes in the specific biological process is lower than expected; and black—the number of genes in the specific biological process is as expected. Note the enrichment of zinc-ion binding gene set for patients with relapses (MS subjects Nos. 88, 93, 99, 109, 110, 173, 210, 213, 215) and cytokine activity gene set for patients with stable disease (no change in neurological disability, EDSS=0; MS subjects Nos. 23, 25, 31, 34, 89, 119, 158).

[0042] FIG. 9 is a schematic model depicting the reconstructed zinc-ion binding pathway. Pathway analysis performed using genes from the predictive signature (yellow circles) and genes brought into the pathway based on literature known relationships according to PathwayArchitect software (green circles). Arrows indicate regulatory interactions confirmed by literature database, dashed arrows indicate suggested gene interactions;

[0043] FIG. 10 is a schematic model depicting the reconstructed cytokine activity pathway. Pathway analysis performed using genes from the predictive signature (gray circles) and genes brought into the pathway based on literature known relationships according to PathwayArchitect software (blue circles). Arrows indicate regulatory interactions confirmed by literature database, dashed arrows indicate suggested gene interactions;

[0044] FIG. 11 depicts the gene expression regulatory network module. The single gene expression module from the gene expression regulatory network of 431 differentiating genes is demonstrated. Each node in the regulation tree represents a regulating gene. The expression of the regulating genes themselves is shown below their node. Cluster of gene expression profiles (rows represent genes, columns—patients arrays) arranged according to the regulation tree. Note that zinc-ion binding related genes KLF4 (regulating gene, arrow on the left) and S100B (regulated gene, arrow on the right) belong to same regulatory module.

[0045] FIG. 12 is a graph depicting the average error of the predictive ability of combination of 431 differentiating genes.

### DESCRIPTION OF SPECIFIC EMBODIMENTS OF THE INVENTION

[0046] The present invention, in some embodiments thereof, relates to genetic markers which are differentially expressed between subjects diagnosed with multiple sclerosis and having good or poor clinical outcome which can be use to predict the prognosis of a subject diagnosed with multiple sclerosis. Specifically, but not exclusively, the present invention can be used to treat multiple sclerosis by selecting a suitable treatment regimen based on the predicted clinical outcome of the subject.

[0047] Before explaining at least one embodiment of the invention in detail, it is to be understood that the invention is not limited in its application to the details set forth in the following description or exemplified by the Examples. The invention is capable of other embodiments or of being practiced or carried out in various ways. Also, it is to be understood that the phraseology and terminology employed herein is for the purpose of description and should not be regarded as limiting.

[0048] While reducing the invention to practice, the present inventors have uncovered differentially expressed genes which are associated with poor or good clinical outcome of multiple sclerosis and which can be used to predict the prognosis of a subject diagnosed with multiple sclerosis.

[0049] As is shown in the Examples section which follows, the present inventors have identified 431 genetic markers which are differentially expressed between relapsing-remitting MS (RRMS) patients with good or poor clinical outcome as established after a 2-year follow-up (FIGS. 2a-b, 3, 4, 5 and Table 2 and Example 1 of the Examples section which follows). Moreover, when supervised learning and feature selection algorithms were applied and validated in an independent set of 27 samples from a prospective cohort of RRMS patients, an optimal set of 34 gene transcripts was depicted as a clinical outcome predictive gene expression signature with a classification accuracy of 88.9% (FIGS. 1, 6, Table 3, Example 2 of the Examples section which follows). This predictive signature was enriched in genes biologically related to zinc-ion binding and cytokine activity regulation pathways (FIGS. 7, 8a-c, 9, 10, 11, Example 3 of the Examples section which follows). In addition, when the SVM software based on RBF kernel were applied on a training set of 26 subjects optimal sets of genes which can predict the prognosis of RRMS patients with 100% accuracy (average error of “0”) were depicted (FIG. 12, Table 4, Example 4 of the Examples section which follows). Altogether, these results demonstrate for the first time that genetic markers can discriminate between MS patients with good and poor clinical outcome, and suggest the use of such differentially expressed genes in predicting the prognosis of multiple sclerosis.

[0050] Thus, according to one aspect of the invention there is provided a method of predicting a prognosis of a subject diagnosed with multiple sclerosis. The method is effected by determining in a cell of the subject a level of expression of at least one polynucleotide sequence selected from the group consisting of SEQ ID NOs:1-431, wherein an alteration above a predetermined threshold in the level of expression of the at least one polynucleotide sequence in the cell of the subject relative to a level of expression of the at least one polynucleotide sequence in a reference cell is indicative of the prognosis of the subject diagnosed with multiple sclerosis.

[0051] As used herein, the phrase “a subject diagnosed with multiple sclerosis” refers to a mammal, preferably a human being, who is diagnosed with definite multiple sclerosis, e.g., a subject who experienced at least two neurological attacks affecting the CNS and accompanied by demyelinating lesions on brain magnetic resonance imaging (MRI). It will be appreciated that the disease course of patients diagnosed with multiple sclerosis can be a relapsing-remitting multiple sclerosis (RRMS) (occurring in 85% of the patients) or a progressive multiple sclerosis (occurring in 15% of the patients). According to an embodiment of the invention, the subject is diagnosed with RRMS.

[0052] As used herein, the phrase “predicting a prognosis” refers to determining the clinical outcome of the subject diagnosed with multiple sclerosis, e.g., determining the risk of deterioration in terms of neurological disability and/or the total number of relapses. For example, a good clinical outcome (good prognosis) of a subject diagnosed with multiple sclerosis is no deterioration in the neurological disability [no change in the Expanded Disability Status Scale (EDSS) score] and no relapses for a period of at least 24 months; a poor clinical outcome (poor prognosis) is a deterioration in the neurological disability (the EDSS score is increased by at least 0.5 point) within a period of at least 24 months, either with or without relapses; an intermediate clinical outcome (intermediate prognosis) is no deterioration in the neurological disability (no change in the EDSS score) and yet at least one relapse during a period of at least 24 months.

[0053] As mentioned, the method according to this aspect of the invention is effected by determining in a cell of the subject a level of expression of at least one polynucleotide sequence selected from the group consisting of SEQ ID NOs:1-431.

[0054] According to an embodiment of the invention, the method is effected by determining in a cell of the subject a level of expression of at least two, at least three, at least four, at least five, at least six (e.g., six), at least seven (e.g., seven), at least eight, at least nine, at least 10 polynucleotide sequences, at least 20, at least 30, at least 40, at least 50 polynucleotide sequences selected from the group consisting of SEQ ID NOs:1-431, wherein an alteration above a predetermined threshold in the level of expression of each of the polynucleotide sequences in the cell of the subject relative to a level of expression of the same polynucleotide sequences in a reference cell is indicative of the prognosis of the subject diagnosed with multiple sclerosis.

[0055] As used herein, the phrase “level of expression” refers to the degree of gene expression and/or gene product activity in a specific cell. For example, up-regulation or down-regulation of various genes can affect the level of the gene product (i.e., RNA and/or protein) in a specific cell.

[0056] As used herein the phrase “a cell of the subject” refers to any cell, cell content and/or cell secreted content which contains RNA and/or proteins of the subject. Examples include a blood cell, a bone marrow cell, a cell obtained from any tissue biopsy [e.g., cerebrospinal fluid, (CSF), brain biopsy], body fluids such as plasma, serum, saliva, spinal fluid, lymph fluid, the external sections of the skin, respiratory, intestinal, and genitourinary tracts, tears, saliva, sputum and milk. According to an embodiment of the invention, the cell is a blood cell (e.g., white blood cells, macrophages, B- and T-lymphocytes, monocytes, neutrophiles, eosinophiles, and basophiles) which can be obtained using a syringe needle from a vein of the subject. It should be noted that a “cell of the subject” may also optionally comprise a cell that has not been physically removed from the subject (e.g., in vivo detection).

[0057] According to an embodiment of the invention, the white blood cell comprises peripheral blood mononuclear cells (PBMC). The phrase, “peripheral blood mononuclear cells (PBMCs)” as used herein, refers to a mixture of monocytes and lymphocytes. Several methods for isolating white blood cells are known in the art. For example, PBMCs can be isolated from whole blood samples using density gradient centrifugation procedures. Typically, anticoagulated whole blood is layered over the separating medium. At the end of the centrifugation step, the following layers are visually observed from top to bottom: plasma/platelets, PBMCs, separating medium and erythrocytes/granulocytes. The PBMC layer is then removed and washed to remove contaminants (e.g., red blood cells) prior to determining the expression level of the polynucleotide(s) therein.

[0058] It will be appreciated that the cell of the subject can be obtained at any time, e.g., immediately after an attack or during remission.

[0059] According to an embodiment of the invention, detecting the level of expression of the polynucleotide sequences of the invention is effected using RNA or protein molecules which are extracted from the cell of the subject.

[0060] Methods of extracting RNA or protein molecules from cells of a subject are well known in the art.

[0061] Once obtained, the RNA or protein molecules can be characterized for the expression and/or activity level of various RNA and/or protein molecules using methods known in the arts.

[0062] Non-limiting examples of methods of detecting RNA molecules in a cell sample include Northern blot analysis, RT-PCR, RNA in situ hybridization (using e.g., DNA or RNA probes to hybridize RNA molecules present in the cells or tissue sections), in situ RT-PCR (e.g., as described in Nuovo G J, et al. Am J Surg Pathol. 1993, 17: 683-90; Komminoth P, et al. Pathol Res Pract. 1994, 190: 1017-25), and oligonucleotide microarray (e.g., by hybridization of polynucleotide sequences derived from a sample to oligonucleotides attached to a solid surface [e.g., a glass wafer) with addressable location, such as Affymetrix microarray (Affymetrix®, Santa Clara, Calif.)].

[0063] Non-limiting examples of methods of detecting the level and/or activity of specific protein molecules in a cell sample include Enzyme linked immunosorbent assay (ELISA), Western blot analysis, radio-immunoassay (RIA), Fluorescence activated cell sorting (FACS), immunohistochemical analysis, in situ activity assay (using e.g., a chromogenic substrate applied on the cells containing an active enzyme), in vitro activity assays (in which the activity of a particular enzyme is measured in a protein mixture extracted from the cells).

[0064] For example, in case the detection of the expression level of a secreted protein is desired, ELISA assay may be performed on a sample of fluid obtained from the subject (e.g., serum), which contains cell-secreted content.

[0065] As used herein the phrase “reference cell” refers to any cell as described hereinabove of a subject diagnosed with multiple sclerosis and having a known clinical outcome (e.g., poor, good or intermediate clinical outcome) as determined during a predetermined period of time, such as 2 years. Such a reference cell can be a blood cell, a bone marrow cell, a cell obtained from any tissue biopsy (e.g., CSF, brain biopsy), body fluids such as plasma, serum, saliva, spinal fluid, lymph fluid, the external sections of the skin, respiratory, intestinal, and genitourinary tracts, tears, saliva, sputum and milk. It will be appreciated that the level of expression of the above referenced polynucleotides/polypeptides may be obtained from scientific literature.

[0066] According to an embodiment of the invention, the reference cell comprises a cell of a subject diagnosed with multiple sclerosis and having a good clinical outcome. For example, such a reference cell can be a blood cell of a subject which exhibited no deterioration in the neurological disability (no change in the EDSS score) and no relapses during a period of at least 24 months.

[0067] Since as is shown in Table 2 and is described in Example 1 of the Examples section which follows, 238 polynucleotide sequences displayed elevated expression in the MS patients having poor clinical outcome relative to the MS patients having good clinical outcome, in order to predict the prognosis of a subject diagnosed with multiple sclerosis, the level of expression of at least one polynucleotide sequence selected from the group consisting of SEQ ID NOs:194-431 is determined and compared to the level of expression of the same polynucleotide sequences in a reference cell derived from a subject diagnosed with MS and having good clinical outcome, wherein an upregulation (increase) in the expression level of the at least one polynucleotide sequence above a predetermined threshold relative to the reference cell is indicative of a poor prognosis (poor clinical outcome).

[0068] Additionally or alternatively, since as is further shown in Table 2 and is described in Example 1 of the Examples section which follows, the level of expression of 193 polynucleotide sequences was downregulated in the MS patients having poor clinical outcome relative to the MS patients having good clinical outcome, in order to predict the prognosis of a subject diagnosed with multiple sclerosis, the level of expression of at least one polynucleotide sequence selected from the group consisting of SEQ ID NOs:1-193 is determined and compared to the level of expression of the same polynucleotide sequences in a reference cell derived from a subject diagnosed with MS and having good clinical outcome, wherein downregulation (decrease) in the expression level of the at least one polynucleotide sequence above a predetermined threshold relative to the reference cell is indicative of a poor prognosis (poor clinical outcome).

[0069] According to an embodiment of the invention, the reference cell comprises a cell of a subject diagnosed with multiple sclerosis and having a poor clinical outcome. For example, such a reference cell can be a blood cell of a subject which exhibited deterioration in the neurological disability (at least 0.5 point in the EDSS score) during a period of at least 24 months, either with or without relapses.

[0070] Since as is shown in Table 2 and is described in Example 1 of the Examples section which follows, the expression level of 238 polynucleotide sequences was downregulated in MS patients having good clinical outcome relative to the level of expression in MS patients having poor clinical outcome, in order to predict the prognosis of a subject diagnosed with MS, the level of expression of at least one polynucleotide sequence selected from the group consisting of SEQ ID NOs:194-431 is determined and compared to the level of expression of the same polynucleotide sequences in a reference cell derived from an MS patient with poor clinical outcome, wherein downregulation (decrease) in the expression level of the at least one polynucleotide sequence above a predetermined threshold relative to the reference cell is indicative of a good prognosis (good clinical outcome).

[0071] Additionally or alternatively, since as is shown in Table 2 and is described in Example 1 of the Examples section which follows, the level of expression of 193 polynucleotide sequences was upregulated in the MS patients having good clinical outcome relative to the level of expression in MS patients having poor clinical outcome, in order to predict the prognosis of a subject diagnosed with MS, the level of expression of at least one polynucleotide sequence selected from the group consisting of SEQ ID NOs:1-193 is determined and compared to the level of expression of the same polynucleotide sequences in a reference cell derived from an MS patient with poor clinical outcome, wherein upregulation (increase) in the expression level of the at least one polynucleotide sequence above a predetermined threshold relative to the reference cell is indicative of a good prognosis (good clinical outcome).

[0072] It will be appreciated that the reference cell can be also a cell of a subject diagnosed with multiple sclerosis and having an intermediate clinical outcome. For example, such a reference cell can be a blood cell of a subject which exhibited no deterioration in the neurological disability (no change in the EDSS score), yet experienced at least one relapse during a period of at least 24 months.

[0073] As is further shown in FIG. 6 and Table 3 and is described in Example 2 of the Examples section which follows the present inventors have uncovered that 34 out of the 431 differentiating genetic markers are capable of classifying MS patients to those having good or poor clinical outcome with a classification accuracy of at least 89%.

[0074] Thus, according to an embodiment of the invention, the at least one polynucleotide which expression level is determined in the cell of the subject diagnosed with MS is selected from the polynucleotides set forth in SEQ ID NOs:156, 143, 127, 46, 311, 140, 74, 276, 180, 182, 191, 61, 306, 115, 97, 303, 272, 50, 16, 63, 117, 406, 423, 128, 277, 47, 17, 424, 418, 190, 139, 102, 103 and 325.

[0075] According to an embodiment of the invention, downregulation of the expression level of at least one polynucleotide sequence of the polynucleotides set forth by SEQ ID NOs:156, 143, 127, 46, 140, 74, 180, 182, 191, 61, 115, 97, 50, 16, 63, 117, 128, 47, 17, 190, 139, 102 and 103, and/or upregulation of at least one polynucleotide sequence of the polynucleotides set forth by SEQ ID NOs:311, 276, 306, 303, 272, 406, 423, 277, 424, 418, and 325, relative to a reference cell of a subject diagnosed with MS and having good clinical outcome is indicative of poor prognosis of the subject diagnosed with MS.

[0076] On the other hand, upregulation of the expression level of at least one polynucleotide sequence of the polynucleotides set forth by SEQ ID NOs:156, 143, 127, 46, 140, 74, 180, 182, 191, 61, 115, 97, 50, 16, 63, 117, 128, 47, 17, 190, 139, 102 and 103, and/or downregulation of at least one polynucleotide sequence of the polynucleotides set forth by SEQ ID NOs:311, 276, 306, 303, 272, 406, 423, 277, 424, 418, and 325 relative to a reference cell of a subject diagnosed with MS and having poor clinical outcome is indicative of good prognosis of the subject diagnosed with MS.

[0077] As is further shown in FIG. 6 and Table 3 and is described in Example 2 of the Examples section which follows, classification rate of 85.2% was achieved using markers of the following 6 genes: TPSB2 (SEQ ID NO:127), IGLJ3 (SEQ ID NO:423), HAB1 (SEQ ID NOs:16 and/or 17), RRN3 (SEQ ID NO:424), COL11A2 (SEQ ID NO:190) and KLF4 (SEQ ID NO:325).

[0078] According to an embodiment of the invention, upregulation of the expression level of IGLJ3 (SEQ ID NO:423), RRN3 (SEQ ID NO:424) and KLF4 (SEQ ID NO:325) and downregulation of TPSB2 (SEQ ID NO:127), HAB1 (SEQ ID NOs:16 and/or 17) and COL11A2 (SEQ ID NO:190) relative to a reference cell of a subject diagnosed with MS and having good clinical outcome is indicative of poor prognosis of the subject diagnosed with MS.

[0079] On the other hand, downregulation of the expression level of IGLJ3 (SEQ ID NO:423), RRN3 (SEQ ID NO:424) and KLF4 (SEQ ID NO:325) and upregulation of TPSB2 (SEQ ID NO:127), HAB1 (SEQ ID NOs:16 and/or 17) and COL (SEQ ID NO:190) relative to a reference cell of a subject diagnosed with MS and having poor clinical outcome is indicative of good prognosis of the subject diagnosed with MS.

[0080] As is further shown in FIG. 6 and Table 3 and is described in Example 2 of the Examples section which follows, classification rate of 70.4% was achieved using only one gene (RRN3; SEQ ID NO:424). Thus, according to an embodiment of the invention upregulation of the expression level of RRN3 (SEQ ID NO:424) relative to a reference cell of a subject diagnosed with MS and having good clinical outcome is indicative of a poor prognosis of a subject diagnosed with MS. On the other hand, downregulation of the expression level of RRN3 (SEQ ID NO:424) relative to a reference cell of a subject diagnosed with MS and having poor clinical outcome is indicative of a good prognosis of a subject diagnosed with MS.

[0081] As is further shown in FIG. 12 and Table 4 (Example 4) and mentioned hereinabove, when the SVM based on RBF kernel were applied on 26 subjects optimal sets of genes which can predict the prognosis of RRMS patients with 100% accuracy (average error of “0”) were depicted.

[0082] Thus, according to an embodiment of the invention the at least one polynucleotide which expression level is determined in the cell of the subject diagnosed with MS is set forth by SEQ ID NO:158.

[0083] According to an embodiment of the invention, the polynucleotide sequences which expression level are determined in the cell of the subject diagnosed with MS are those depicted in any of the following groups of row numbers of Table 4 in Example 4 of the Examples section which follows: rows 1-2; rows 1-3; rows 1-4; rows 1-5; rows 1-6; rows 1-7; rows 1-8; rows 1-9; rows 1-10; rows 1-11; rows 1-12; rows 1-13; rows 1-14; rows 1-15; rows 1-16; rows 1-17; rows 1-18; rows 1-19; rows 1-20; rows 1-21; rows 1-22; rows 1-23; rows 1-24; rows 1-25; rows 1-26; rows 1-27; rows 1-28; rows 1-29; rows 1-30; rows 1-31; rows 1-32; rows 1-33; rows 1-34; 1-35; rows 1-36; rows 1-37; rows 1-38; rows 1-39; rows 1-40; rows 1-41; rows 1-42; rows 1-43; rows 1-44; rows 1-45; rows 1-46; rows 1-47; rows 1-48; rows 1-49; rows 1-50; rows 1-51; rows 1-52; rows 1-53; rows 1-54; 1-55; rows 1-56; rows 1-57; rows 1-58; rows 1-59; rows 1-60; rows 1-61; rows 1-62; rows 1-63; rows 1-64; rows 1-65; rows 1-66; rows 1-67; rows 1-68; rows 1-69; rows 1-70; rows 1-71; rows 1-72; rows 1-73; rows 1-74; 1-75; rows 1-76; rows 1-77; rows 1-78; rows 1-79; rows 1-80; rows 1-81; rows 1-82; rows 1-83; rows 1-84; rows 1-85; rows 1-86; rows 1-87; rows 1-88; rows 1-89; rows 1-90; rows 1-91; rows 1-92; rows 1-93; rows 1-94; 1-95; rows 1-96; rows 1-97; rows 1-98; rows 1-99; rows 1-100; rows 1-101; rows 1-102; rows 1-103; rows 1-104; rows 1-105; rows 1-106; rows 1-107; rows 1-109; rows 1-110; rows 1-112; rows 1-113; rows 1-114; rows 1-116; rows 1-122; 1-124; rows 1-125; rows 1-126; rows 1-129; rows 1-146; rows 1-157.

[0084] As is further shown in Table 4 (Example 4) other groups of genes can predict the prognosis of RRMS patients with 99.5% accuracy (average error of “0.005”).

[0085] According to an embodiment of the invention, the polynucleotide sequences which expression level are determined in the cell of the subject diagnosed with MS are those depicted in any of the following groups of row numbers of Table 4 in Example 4 of the Examples section which follows: rows 1-108; rows 1-111; rows 1-115; rows 1-117; rows 1-118; rows 1-119; rows 1-120; rows 1-121; rows 1-123; rows 1-127; rows 1-128; rows 1-131; rows 1-132; rows 1-133; 1-135; rows 1-137; rows 1-138; rows 1-139; rows 1-141; rows 1-144; rows 1-148; rows 1-150; rows 1-152; rows 1-153; rows 1-154; rows 1-158; rows 1-160; rows 1-167.

[0086] As is further shown in Table 4 (Example 4) other groups of genes can predict the prognosis of RRMS patients with 99% accuracy (average error of “0.01”).

[0087] According to an embodiment of the invention, the polynucleotide sequences which expression level are determined in the cell of the subject diagnosed with MS are those depicted in any of the following groups of row numbers of Table 4 in Example 4 of the Examples section which follows: rows 1-130; rows 1-134; rows 1-136; rows 1-140; rows 1-145; rows 1-147; 1-149; rows 1-151; rows 1-155; rows 1-156; rows 1-159; rows 1-162; rows 1-168; rows 1-170.

[0088] As is further shown in Table 4 (Example 4) other groups of genes can predict the prognosis of RRMS patients with 98-98.5% accuracy (average error of “0.015-0.02”).

[0089] According to an embodiment of the invention, the polynucleotide sequences which expression level are determined in the cell of the subject diagnosed with MS are those depicted in any of the following groups of row numbers of Table 4 in Example 4 of the Examples section which follows: rows 1-142; rows 1-143; rows 1-161; rows 1-163; rows 1-164; rows 1-165; rows 1-166; rows 1-169; rows 1-172; rows 1-173; rows 1-174; rows 1-177; rows 1-178; rows 1-179; rows 1-181; rows 1-187.

[0090] As is further shown in Table 4 (Example 4) other groups of genes can predict the prognosis of RRMS patients with 95-97.5% accuracy (average error of “0.025-0.05”).

[0091] According to an embodiment of the invention, the polynucleotide sequences which expression level are determined in the cell of the subject diagnosed with MS are those depicted in any of the following groups of row numbers of Table 4 in Example 4 of the Examples section which follows: rows 1-171; rows 1-176; rows 1-180; rows 1-183; rows 1-184; rows 1-185; rows 1-186; rows 1-188; rows 1-189; rows 1-190; rows 1-191; rows 1-192; rows 1-193; rows 1-194; rows 1-195; rows 1-196; rows 1-197; rows 1-198; rows 1-199; 1-200; rows 1-201; rows 1-202; rows 1-203; rows 1-204; rows 1-205; rows 1-206; rows 1-207; rows 1-208; rows 1-209; rows 1-210; rows 1-211; rows 1-212; rows 1-213; rows 1-214; rows 1-215; rows 1-216; rows 1-217; rows 1-218; rows 1-219; rows 1-220; rows 1-221; rows 1-222; rows 1-223; rows 1-224; rows 1-225; rows 1-226; rows 1-227; rows 1-228; rows 1-229; rows 1-230; rows 1-231; rows 1-232; rows 1-233; rows 1-234; rows 1-235; rows 1-236; rows 1-237; rows 1-238; rows 1-239; rows 1-241; rows 1-242; rows 1-243; rows 1-244; rows 1-245; rows 1-247; rows 1-248; rows 1-249; rows 1-250; rows 1-252; rows 1-255; rows 1-256; rows 1-257; rows 1-258; rows 1-259; rows 1-264.

[0092] As is further shown in Table 4 (Example 4) other groups of genes can predict the prognosis of RRMS patients with 90-94.5% accuracy (average error of “0.1-0.055”).

[0093] According to an embodiment of the invention, the polynucleotide sequences which expression level are determined in the cell of the subject diagnosed with MS are those depicted in any of the following groups of row numbers of Table 4 in Example 4 of the Examples section which follows: rows 1-240; rows 1-246; rows 1-251; rows 1-263; rows 1-254; rows 1-260; rows 1-261; rows 1-262; rows 1-263; rows 1-265; rows 1-266; rows 1-267; rows 1-268; rows 1-269; rows 1-270; rows 1-271; rows 1-272; rows 1-273; rows 1-274; rows 1-275; rows 1-276; rows 1-277; rows 1-278; rows 1-279; rows 1-280; rows 1-281; rows 1-282; rows 1-283; rows 1-284; rows 1-285; rows 1-286; rows 1-287; rows 1-288; rows 1-289; rows 1-290; rows 1-291; rows 1-292; rows 1-293; rows 1-294; rows 1-295; rows 1-296; rows 1-297; rows 1-298; rows 1-299; rows 1-300; rows 1-301; rows 1-302; rows 1-3030; rows 1-304; rows 1-305; rows 1-306; rows 1-307; rows 1-308; rows 1-309; rows 1-312; rows 1-313; rows 1-314; rows 1-315; rows 1-316; rows 1-317; rows 1-318; rows 1-324; rows 1-325; rows 1-327; rows 1-328; rows 1-335; rows 1-344;

[0094] As used herein the phrase “an alteration above a predetermined threshold” refers to a fold increase or decrease (i.e., degree of upregulation or downregulation, respectively) which is higher than a predetermined threshold such as at least about 1.004, at least about twice, at least about three times, at least about four time, at least about five times, at least about six times, at least about seven times, at least about eight times, at least about nine times, at least about 20 times, at least about 50 times, at least about 100 times, at least about 200 times, at least about 350, at least about 500 times, at least about 1000 times, at least about 2000 times, at least about 3000 times relative to the reference cell.

[0095] For example, as is shown in Table 2, while the level of expression of the polynucleotide sequences set forth by SEQ ID NOs:43-136, is at least twice higher in MS patients having good clinical outcome as compared to MS patients having poor clinical outcome, the level of expression of the polynucleotide sequences set forth by SEQ ID NOs:137-161, the polynucleotide sequences set forth by SEQ ID NOs:162-185, the polynucleotide sequences set forth by SEQ ID NOs:186-191 or the polynucleotides set forth by SEQ ID NOs:192-193 is at least 5, 10, 50 or 350 or 150 times, respectively, higher in cells of MS patients having good clinical outcome as compared to cells of MS patients having poor clinical outcome.

[0096] In addition, as is further shown in Table 2, while the level of expression of the polynucleotide sequences set forth by SEQ ID NOs:271-366, is at least twice higher in cells of MS patients having poor clinical outcome as compared to cells of MS patients having good clinical outcome, the level of expression of the polynucleotide sequences set forth by SEQ ID NOs:367-399, the polynucleotides set forth by SEQ ID NOs:400-426, the polynucleotides set forth by SEQ ID NOs:427-430 or the polynucleotide set forth by SEQ ID NO:431 is at least 5, 10, 50 or 350 times, respectively, higher in cells of MS patients having poor clinical outcome as compared to cells of MS patients having good clinical outcome.

[0097] Thus, the method of predicting the prognosis of a subject diagnosed with MS according to the invention enables the classification of MS patients to those having good prognosis (good clinical outcome, e.g., that will not deteriorate in their neurological disability and that will not experience any relapse for at least 2 years) and those having poor prognosis [poor clinical outcome, e.g., that will deteriorate in their neurological disability (e.g., at least 0.5 point in the EDSS score), with or without relapses)].

[0098] It will be appreciated that prediction of the prognosis of a subject diagnosed with MS can be used to select the treatment regimen of a subject and thereby treat the subject diagnosed with MS.

[0099] Thus, according to yet another aspect of the invention there is provided a method of treating of a subject diagnosed with multiple sclerosis. The method is effected by: (a) determining in a cell of the subject a level of expression of at least one polynucleotide sequence selected from the group consisting of SEQ ID NOs:1-431, wherein an alteration above a predetermined threshold in the level of expression of the at least one polynucleotide sequence in the cell of the subject relative to a level of expression of the at least one polynucleotide sequence in a reference cell is indicative of a prognosis of the subject diagnosed with multiple sclerosis, and (b) selecting a treatment regimen based on the prognosis, thereby treating the subject diagnosed with multiple sclerosis.

[0100] As used herein the phrase “treating” refers to inhibiting or arresting the development of a pathology (multiple sclerosis, e.g., RRMS) and/or causing the reduction, remission, or regression of a pathology and/or optimally curing the pathology. Those of skill in the art will understand that various methodologies and assays can be used to assess the development of the pathology, and similarly, various methodologies and assays may be used to assess the reduction, remission or regression of the pathology.

[0101] As used herein the phrase “treatment regimen” refers to a treatment plan that specifies the type of treatment, dosage, schedule and/or duration of a treatment provided to a subject in need thereof (i.e., a subject diagnosed with multiple sclerosis). The selected treatment regimen can be an aggressive one which is expected to result in the best clinical outcome (e.g., complete cure of the pathology), yet may be associated with some discomfort to the subject or adverse side effects (e.g., a damage to healthy cells or tissue); or a more moderate one which may relief symptoms of the pathology yet may results in incomplete cure of the pathology. The type of treatment, dosage, schedule and duration of treatment can vary, depending on the severity of pathology and the predicted outcome (prognosis) of the subject, and those of skills in the art are capable of adjusting the type of treatment with the dosage, schedule and duration of treatment.

[0102] According to an embodiment of the invention, when the predicted prognosis of the subject diagnosed with MS is poor prognosis, i.e., there is a high probability that the subject will display an increase of at least 0.5 point in the EDSS score within a period of two years, the treatment regimen selected for treating such a subject according to the method of this aspect of the invention comprises an aggressive therapy using a medicament such as high dosage of interferon beta 1a [Rebif, which can be administered subcutaneously, at a dosage of e.g., 44 μg, three times a week].

[0103] According to an embodiment of the invention, when the predicted prognosis of the subject diagnosed with MS is good prognosis, i.e., there is a high probability that the subject will display no change in the EDSS score and no relapses within a period of two years, the treatment regimen selected for treating such a subject according to the method of this aspect of the invention comprises a moderate therapy using a medicament such as moderate dosage of interferon beta 1a [Rebif, which can be administered subcutaneously, at a dosage of e.g., 22 μg, three times a week].

[0104] Thus, the teachings of the invention can be used to adapt a treatment regimen to the subject diagnosed with MS according to its predicted clinical outcome as determined with high accuracy (over 89%) by the method of the invention. It will be appreciated that selection of suitable treatment regimens is crucial for achieving cure and remission of symptoms in the affected subjects without exposing them to un-necessary medicaments and on the other hand, is highly beneficial in terms of saving un-necessary costs to the health system.

[0105] It will be appreciated that the reagents utilized by any of the methods of the invention which are described hereinabove can form a part of a diagnostic kit/article of manufacture.

[0106] The kit of the invention comprises at least 2 and no more than 700 isolated nucleic acid sequences, preferably, at least 4 and no more than 700 isolated nucleic acid sequences, preferably, at least 4 and no more than 600 isolated nucleic acid sequences, preferably, at least 6 and no more than 500 isolated nucleic acid sequences, preferably, at least 6 and no more than 431 isolated nucleic acid sequences, preferably, at least 6 and no more than 34 isolated nucleic acid sequences, wherein each of the at least 2 and no more than 700 isolated nucleic acid sequences is capable of specifically recognizing at least one specific polynucleotide sequence selected from the group consisting of SEQ ID NOs:1-431.

[0107] The isolated nucleic acid sequences included in the kit of the invention can be single-stranded or double-stranded, naturally occurring or synthetic nucleic acid sequences such as oligonucleotides, RNA molecules, genomic DNA molecules, cDNA molecules and/or cRNA molecules. The isolated nucleic acid sequences of the kit can be composed of naturally occurring bases, sugars, and covalent internucleoside linkages (e.g., backbone), as well as non-naturally occurring portions, which function similarly to respective naturally occurring portions.

[0108] Synthesis of the isolated nucleic acid sequences of the kit can be performed using enzymatic synthesis or solid-phase synthesis. Equipment and reagents for executing solid-phase synthesis are commercially available from, for example, Applied Biosystems. Any other means for such synthesis may also be employed; the actual synthesis of the oligonucleotides is well within the capabilities of one skilled in the art and can be accomplished via established methodologies as detailed in, for example: Sambrook, J. and Russell, D. W. (2001), “Molecular Cloning: A Laboratory Manual”; Ausubel, R. M. et al., eds. (1994, 1989), “Current Protocols in Molecular Biology,” Volumes I-III, John Wiley & Sons, Baltimore, Md.; Perbal, B. (1988), “A Practical Guide to Molecular Cloning,” John Wiley & Sons, New York; and Gait, M. J., ed. (1984), “Oligonucleotide Synthesis”; utilizing solid-phase chemistry, e.g. cyanoethyl phosphoramidite followed by deprotection, desalting, and purification by, for example, an automated trityl-on method or HPLC.

[0109] According to an embodiment of the invention, each of the isolated nucleic acid sequences included in the kit of invention comprises at least 10 and no more than 50 nucleic acids, more preferably, at least 15 and no more than 45, more preferably, between 15-40, more preferably, between 20-35, more preferably, between 20-30, even more preferably, between 20-25 nucleic acids.

[0110] The kit may include at least one reagent as described hereinabove which is suitable for recognizing the at least one specific polynucleotide sequence selected from the group consisting of SEQ ID NOs:1-431. Examples include reagents suitable for hybridization or annealing of a specific polynucleotide of the kit to a specific target polynucleotide sequence (e.g., RNA transcript derived from the cell of the subject or a cDNA derived therefrom) such as formamide, sodium chloride, and sodium citrate), reagents which can be used to labele polynucleotides (e.g., radiolabeled nucleotides, biotinylated nucleotides, digoxigenin-conjugated nucleotides, fluorescent-conjugated nucleotides) as well as reagents suitable for detecting the labeled polynucleotides (e.g., antibodies conjugated to fluorescent dyes, antibodies conjugated to enzymes, radiolabeled antibodies and the like).

[0111] Additionally or alternatively, the kit of the invention comprises at least one reagent suitable for detecting the expression level and/or activity of at least one polypeptide encoded by at least one polynucleotides selected from the group consisting of SEQ ID NOs:1-431. Such a reagent can be, for example, an antibody capable of specifically binding to at least one epitope of the polypeptide. Additionally or alternatively, the reagent included in the kit can be a specific substrate capable of binding to an active site of the polypeptide. In addition, the kit may also include reagents such as fluorescent conjugates, secondary antibodies and the like which are suitable for detecting the binding of a specific antibody and/or a specific substrate to the polypeptide.

[0112] The kit preferably includes a reference cell which comprises a cell of a subject diagnosed with MS and with a known clinical outcome for at least 24 months as described hereinabove.

[0113] The kit of the invention preferably includes packaging material packaging the at least one reagent and a notification in or on the packaging material. Such a notification identifies the kit for use in predicting the prognosis of a subject diagnosed with MS and selecting a treatment regimen of a subject and thereby treating the subject diagnosed with MS. The kit may also include instructions for use in predicting the prognosis of a subject diagnosed with MS and/or selecting a treatment regimen of a subject and/or treating the subject diagnosed with MS. The kit may also include appropriate buffers and preservatives for improving the shelf-life of the kit.

[0114] It will be appreciated that the isolated nucleic acid sequences described hereinabove (e.g., oligonucleotides) can form a part of a probeset. The probeset comprises a plurality of oligonucleotides and no more than 700 oligonucleotides wherein each of the plurality of oligonucleotides is capable of specifically recognizing at least one polynucleotide sequence selected from the group consisting of SEQ ID NOs:1-431.

[0115] It will be appreciated that the isolated nucleic acid sequences included in the kit or the probeset of the invention can be bound to a solid support e.g., a glass wafer in a specific order, i.e., in the form of an addressable microarray. Alternatively, isolated nucleic acid sequences can be synthesized directly on the solid support using well known prior art approaches (Seo T S, et al., 2004, Proc. Natl. Acad. Sci. USA, 101: 5488-93.). In any case, the isolated nucleic acid sequences are attached to the support in a location specific manner such that each specific isolated nucleic acid sequence has a specific address on the support (i.e., an addressable location) which denotes the identity (i.e., the sequence) of that specific isolated nucleic acid sequence.

[0116] According to an embodiment of the invention the microarray comprises no more than 700 isolated nucleic acid sequences, wherein each of the isolated nucleic acid sequences is capable of specifically recognizing at least one specific polynucleotide sequence selected from the group consisting of SEQ ID NOs:1-431.

[0117] As used herein the term “about” refers to ±10%.

[0118] Additional objects, advantages, and novel features of the invention will become apparent to one ordinarily skilled in the art upon examination of the following examples, which are not intended to be limiting. Additionally, each of the various embodiments and aspects of the invention as delineated hereinabove and as claimed in the claims section below finds experimental support in the following examples.

### EXAMPLES

[0119] Reference is now made to the following examples, which together with the above descriptions, illustrate the invention in a non-limiting fashion.

[0120] Generally, the nomenclature used herein and the laboratory procedures utilized in the present invention include molecular, biochemical, microbiological and recombinant DNA techniques. Such techniques are thoroughly explained in the literature. See, for example, “Molecular Cloning: A laboratory Manual” Sambrook et al., (1989); “Current Protocols in Molecular Biology” Volumes I-III Ausubel, R. M., ed. (1994); Ausubel et al., “Current Protocols in Molecular Biology”, John Wiley and Sons, Baltimore, Md. (1989); Perbal, “A Practical Guide to Molecular Cloning”, John Wiley & Sons, New York (1988); Watson et al., “Recombinant DNA”, Scientific American Books, New York; Birren et al. (eds) “Genome Analysis: A Laboratory Manual Series”, Vols. 1-4, Cold Spring Harbor Laboratory Press, New York (1998); methodologies as set forth in U.S. Pat. Nos. 4,666,828; 4,683,202; 4,801,531; 5,192,659 and 5,272,057; “Cell Biology: A Laboratory Handbook”, Volumes I-III Cellis, J. E., ed. (1994); “Current Protocols in Immunology” Volumes I-III Coligan J. E., ed. (1994); Stites et al. (eds), “Basic and Clinical Immunology” (8th Edition), Appleton & Lange, Norwalk, Conn. (1994); Mishell and Shiigi (eds), “Selected Methods in Cellular Immunology”, W. H. Freeman and Co., New York (1980); available immunoassays are extensively described in the patent and scientific literature, see, for example, U.S. Pat. Nos. 3,791,932; 3,839,153; 3,850,752; 3,850,578; 3,853,987; 3,867,517; 3,879,262; 3,901,654; 3,935,074; 3,984,533; 3,996,345; 4,034,074; 4,098,876; 4,879,219; 5,011,771 and 5,281,521; “Oligonucleotide Synthesis” Gait, M. J., ed. (1984); “Nucleic Acid Hybridization” Hames, B. D., and Higgins S. J., eds. (1985); “Transcription and Translation” Hames, B. D., and Higgins S. J., Eds. (1984); “Animal Cell Culture” Freshney, R. I., ed. (1986); “Immobilized Cells and Enzymes” IRL Press, (1986); “A Practical Guide to Molecular Cloning” Perbal, B., (1984) and “Methods in Enzymology” Vol. 1-317, Academic Press; “PCR Protocols: A Guide To Methods And Applications”, Academic Press, San Diego, Calif. (1990); Marshak et al., “Strategies for Protein Purification and Characterization—A Laboratory Course Manual” CSHL Press (1996); all of which are incorporated by reference as if fully set forth herein. Other general references are provided throughout this document. The procedures therein are believed to be well known in the art and are provided for the convenience of the reader. All the information contained therein is incorporated herein by reference.

### General Materials, Experimental and Statistical Methods

[0121] Study subjects—Fifty-three patients with definite relapsing-remitting multiple sclerosis (RRMS) (37 females, 16 males), age 40.2+5.8 years, disease duration 9.9+4.2 years, annual relapse rate 1.3±0.7 and neurological disability evaluated by the Expanded Disability Status Scale (EDSS) (7) 2.0±1.0, were included in the study; 26 patients participated in the differentiating clinical outcome analysis and 27 patients in the validation process of prediction. The clinical and demographic variables were similar between groups and are presented in Table 1, hereinbelow. In the differentiating clinical outcome group 13 patients were on immunomodulatory treatments for at least three months prior to the gene expression study, and 13 patients were naïve to immunomodulatory treatment. In the validation group 11 patients were on immunomodulatory treatments for at least three months prior to the gene expression study, and 16 patients were naïve to immunomodulatory treatments. Within up to one month from blood withdrawing all patients were treated with interferon beta 1-a. None of the patients had ever received cytotoxic treatments and all were free of steroid treatment for at least 30 days before blood was withdrawn. All patients had peripheral blood counts within the normal range. The study was approved by the Sheba Medical Center Institutional Review Board, and all patients gave a written informed consent for participation.

TABLE 1
Clinical characteristics of patients with
relapsing-remitting multiple sclerosis (RRMS)

| | Differentiating clinical | Validation Group |
|---|---|---|
| Characteristic | outcome Group; N = 26 | N = 27 |
| Age (yr) | 40.2 ± 5.8 | 40.5 ± 1.6 |
| F (M) | 21 (5) | 16 (11) |
| Disease duration (yr) | 9.9 ± 4.2 | 10.3 ± 1.6 |
| Relapse rate | 1.3 ± 0.7 | 0.9 ± 0.2 |
| EDSS | 2.0 ± 1.0 | 2.5 ± 0.2 |
| Treated | 13 | 11 |

Table 1 depicts the clinical characteristics of patients with relapsing-remitting multiple sclerosis: patients participated in the differentiating clinical outcome group or in the validation group. Yr—year; F—female; M—male.

[0122] Clinical follow-up—Patients were prospectively followed-up for a period of two years. Neurological examination was performed once every three months and at the time of a suspected relapse, and EDSS assessment was completed accordingly. Relapse was defined as the onset of new objective neurological symptoms/signs or worsening of existing neurological disability, not accompanied by metabolic changes, fever or other signs of infection, lasting for a period of at least 48 hours accompanied by objective change of at least 0.5 point in the EDSS score. For EDSS evaluations, only stable EDSS scores that were confirmed at three months follow-up examinations were used. Confirmed relapses and EDSS scores were consecutively recorded.

[0123] Definition of clinical outcome—Clinical outcome was defined according to neurological disability as the primary criterion and total number of relapses as the secondary criterion.

[0124] Good outcome: patients that had not deteriorated in their neurological disability and had not experienced any relapse during the 24 months of follow-up.

[0125] Poor outcome: Patients that deteriorated in their neurological disability (EDSS increased by at least 0.5 points) within the 24 months of follow-up, either with or without relapses.

[0126] Intermediate outcome: Patients that did not deteriorate in their neurological disability yet experienced at least one relapse during the 24 months follow-up.

[0127] RNA isolation and microarray expression profiling—Peripheral blood mononuclear cells (PBMC) were separated on Ficoll hypaque gradient, total RNA was purified, labeled, hybridized to a Genechip array (U95Av2 and HU-133A) and scanned (Hewlett Packard, GeneArray-TM scanner G2500A) according to the manufacturer's protocol (Affymetrix Inc, Santa Clara, Calif.), as previously described (6).

[0128] Clinical outcome differentiating genes analysis—RMAExpress software was used to analyze the scanned arrays (8). In order to be consistent with the ontology and array type, all the transcripts in U95Av2 microarray were converted to the corresponding transcripts in HU-133A using NetAffex comparison table. Probesets that did not have a present signal in at least 90% of the samples were filtered. Noise effect was reduced by fitting a multiple effect model for each gene modeling the log-ratio measurement as a sum of contributions for age, gender, batch, subject state (naive or treated), and time from last steroid treatment.

[0129] Statistical methods—Statistical analysis was performed using the ScoreGenes software tools (http://compbio.cs.huji.ac.il/scoregenes/). Data was analyzed by t-test, threshold number of misclassifications (TNoM) method and the Info-test score. Differentiating genes were defined as genes whose expression was significantly higher or lower with p<0.05 in all three statistical tests. Overabundance analysis was used to compare between the number of observed and expected genes that differentiated between the good and poor clinical outcome under the null hypothesis that the classification of the samples was random (9, 10). To further verify the accuracy of the classification the leave-one-out-cross-validation (LOOCV) statistical method (11) was used. LOOCV simulates removal of a single sample for every trial and trains on the rest. The procedure is repeated until each sample is left out once and the number of correct and incorrect predictions is counted.

[0130] Predictive genes analysis—To depict the predictive genes from the differentiating clinical outcome signature support vector machine (SVM) in combination with Forward feature selection algorithm were applied (http://ro.utia.cz/fs/fs_algorithms.html), (12, 13). SVM generates a classifier based on a known labeled training set (19/26 RRMS patients with good or poor clinical outcome from the differentiating clinical outcome group). Then, the classification power of the generated classifier is evaluated by applying it to an independent test set (9/27 RRMS patients from the validation group). The feature selection algorithm finds a subset of predictive genes that enables the generated classifier to achieve the highest classification rate (14, 15). To validate the power of the predictive genes, the classifier was applied to an additional independent set (18/27 RRMS patients from the validation group). The study design is depicted in FIG. 1.

[0131] Biological functional analysis—Functional annotation of the clinical outcome differentiating and predictive gene signatures was done using Functional Classification Tools (FCT, David Bioinformatics Resources, http://david.abcc.ncifcr.gov/home.jsp). Gene enrichment was defined as group of genes highly associated with a specific biological function and statistically measured by one-tail Fisher Exact Probability Value in the David system. Biological regulatory pathways reconstruction for the predictive gene signature was performed by the (1) PathwayArchitect software http://www.stratagene.com based on literature published data, and the (2) Genomica software http://genomica.weizmann.ac.il that is based on Bayesian networks methods taken from the field of machine learning and was applied to the results of the differentiating gene microarray expression signature. This evaluation was aimed to identify potentially target genes that share a common regulatory mechanism.

[0132] Computation of the average error in predicting clinical outcome (good or poor prognosis) for each of the differentiating genes—For each of the 431 differentiating genes (SEQ ID NOs:1-431) the sample was randomly divided into 80% as a “training set” and 20% as a “test set”. The SVM used RBF (radial basic function) kernel to build a model based on the “training set”, which was further tested on the “test set” while saving the error rate. This procedure was repeated 50 times for each gene and the average error for each gene was calculated. Genes with the lowest average error were selected. Then, for each selected gene, the remaining genes were added one after the other, by selecting the next gene such that the average error after 50 repeats of the group of genes including the new gene has the lowest average error as compared to the addition of another gene. This process was repeated 430 times for each additional genes added to the previous group of genes. The results are shown in Table 4, hereinbelow and in FIG. 12.

### Example 1

### Identification of Genetic Markers which are Differentially Expressed Between Patients with Good or Poor Clinical Outcome of RRMS

[0133] Experimental and Statistical Results

[0134] Clinical classification of study patients—Patients were classified into three groups based on their clinical disease outcome. Patients with good outcome (N=9, mean age 39.3±3.3 years, disease duration 10.7±3.4 years), patients with intermediate outcome (N=7, mean age 35.8±5.4 years, disease duration 2.6±0.7 years) and patients with poor outcome (N=10, mean age 46.3±4.2 years, disease duration 10.3±0.9). Comparison between outcome variables demonstrated significant difference between patients with good and poor clinical outcome. Change in neurological disability assessed by the EDSS was −0.33±0.24 (good outcome) and 1.6±0.35 (poor outcome), p=0.0002, total number of relapses was 0 (good outcome) and 1.80±0.35 (poor outcome), p=0.00009, respectively.

[0135] Differentiating clinical outcome gene expression signature—The distinctive clinical outcome gene expression pattern between patients with good and poor clinical outcome included 431 differentiating genes which passed the three statistical tests with p<0.05 (FIGS. 2a-b). Functional analysis disclosed genes associated with signal transduction, catalytic activity, adhesion and inflammation (FIG. 3). Overabundance analysis of the observed compared with the expected number of genes that significantly distinguished between patients with good or poor clinical outcome was higher than expected (431 vs 200 genes at p=0.03) (FIG. 4). LOOCV resulted in a high classification rate of 90% p<0.0001 (FIG. 5), suggesting that the differentiating genes signature is reliable and not related to spurious differences due to multiple testing.

TABLE 2
Clinical outcome differentiating genes in RRMS

| | | SEQ | | | | | F/C | |
|---|---|---|---|---|---|---|---|---|
| | GenBank | ID | TNOM | Info | t-Test | | (Poor/ | Gene |
| Probeset ID | Acc. No. | NO: | PValue | PValue | PValue | Dir | Good) | Symbol |
| 207160_at | NM_000882 | 1 | 2.10E−02 | 3.03E−02 | 3.51E−03 | −1 | 1.004 | IL12A |
| 205034_at | NM_004702 | 2 | 2.10E−02 | 2.60E−02 | 2.71E−03 | −1 | 1.027 | CCNE2 |
| 215935_at | AL080148 | 3 | 4.11E−04 | 2.17E−04 | 3.36E−03 | −1 | 1.055 | C9orf36 |
| 204919_at | NM_007244 | 4 | 2.10E−02 | 3.03E−02 | 3.45E−02 | −1 | 1.108 | PRR4 |
| 201783_s_at | NM_021975 | 5 | 4.11E−04 | 2.17E−04 | 6.77E−05 | −1 | 1.161 | RELA |
| 213457_at | BF739959 | 6 | 3.70E−03 | 3.70E−03 | 1.79E−03 | −1 | 1.368 | MFHAS1 |
| 203145_at | NM_006461 | 7 | 3.70E−03 | 2.49E−03 | 2.82E−03 | −1 | 1.388 | SPAG5 |
| 210822_at | U72513 | 8 | 3.70E−03 | 1.36E−03 | 4.97E−04 | −1 | 1.399 | LOC283345 |
| 206376_at | NM_018057 | 9 | 2.10E−02 | 3.03E−02 | 4.24E−02 | −1 | 1.412 | SLC6A15 |
| 203426_s_at | M65062 | 10 | 2.10E−02 | 2.17E−02 | 2.08E−03 | −1 | 1.439 | IGFBP5 |
| 203205_at | NM_014663 | 11 | 3.70E−03 | 1.36E−03 | 2.65E−03 | −1 | 1.513 | JMJD2A |
| 203324_s_at | NM_001233 | 12 | 2.10E−02 | 2.60E−02 | 1.39E−02 | −1 | 1.516 | CAV2 |
| 207509_s_at | NM_002288 | 13 | 2.10E−02 | 2.60E−02 | 2.90E−02 | −1 | 1.544 | LAIR2 |
| 217165_x_at | M10943 | 14 | 2.10E−02 | 3.03E−02 | 8.33E−03 | −1 | 1.564 | MT1F |
| 215175_at | AB023212 | 15 | 2.10E−02 | 3.03E−02 | 6.57E−03 | −1 | 1.583 | PCNX |
| 215778_x_at | AJ006206 | 16 | 2.10E−02 | 2.60E−02 | 2.29E−02 | −1 | 1.591 | HAB1 |
| 216875_x_at | X83412 | 17 | 2.10E−02 | 2.60E−02 | 2.29E−02 | −1 | 1.591 | HAB1 |
| 205962_at | NM_002577 | 18 | 2.10E−02 | 2.60E−02 | 3.35E−02 | −1 | 1.606 | PAK2 |
| 209685_s_at | M13975 | 19 | 2.10E−02 | 7.04E−03 | 3.04E−03 | −1 | 1.659 | PRKCB1 |
| 207504_at | NM_005182 | 20 | 2.10E−02 | 3.03E−02 | 2.69E−02 | −1 | 1.670 | CA7 |
| 213106_at | AI769688 | 21 | 2.10E−02 | 2.60E−02 | 3.44E−02 | −1 | 1.701 | ATP8A1 |
| 201889_at | NM_014888 | 22 | 2.10E−02 | 1.14E−02 | 4.56E−03 | −1 | 1.722 | FAM3C |
| 209530_at | U07139 | 23 | 3.70E−03 | 3.70E−03 | 2.01E−03 | −1 | 1.727 | CACNB3 |
| 206910_x_at | NM_005666 | 24 | 2.10E−02 | 1.14E−02 | 2.46E−02 | −1 | 1.736 | CFHL2 |
| 213262_at | AI932370 | 25 | 2.10E−02 | 1.14E−02 | 3.86E−02 | −1 | 1.748 | SACS |
| 204316_at | W19676 | 26 | 3.70E−03 | 1.36E−03 | 2.61E−03 | −1 | 1.769 | RGS10 |
| 209031_at | AL519710 | 27 | 2.10E−02 | 2.60E−02 | 1.08E−02 | −1 | 1.783 | IGSF4 |
| 209453_at | M81768 | 28 | 3.70E−03 | 3.70E−03 | 2.89E−02 | −1 | 1.793 | SLC9A1 |
| 212912_at | AI992251 | 29 | 2.10E−02 | 2.17E−02 | 4.27E−03 | −1 | 1.841 | RPS6KA2 |
| 204066_s_at | NM_014914 | 30 | 2.10E−02 | 7.04E−03 | 6.18E−03 | −1 | 1.846 | CENTG2 |
| 206846_s_at | NM_006044 | 31 | 2.10E−02 | 2.17E−02 | 3.55E−03 | −1 | 1.848 | HDAC6 |
| 216224_s_at | AK024083 | 32 | 2.10E−02 | 2.17E−02 | 3.55E−03 | −1 | 1.848 | HDAC6 |
| 205272_s_at | NM_006250 | 33 | 2.10E−02 | 2.60E−02 | 1.88E−02 | −1 | 1.851 | PRH1, PRH2 |
| 214534_at | NM_005322 | 34 | 2.10E−02 | 3.03E−02 | 1.80E−02 | −1 | 1.856 | HIST1H1B |
| 205498_at | NM_000163 | 35 | 2.10E−02 | 2.60E−02 | 2.75E−02 | −1 | 1.903 | GHR |
| 209156_s_at | AY029208 | 36 | 2.10E−02 | 7.04E−03 | 9.25E−03 | −1 | 1.934 | COL6A2 |
| 212534_at | AU144066 | 37 | 2.10E−02 | 7.04E−03 | 4.94E−03 | −1 | 1.936 | ZNF24 |
| 203022_at | NM_006397 | 38 | 2.10E−02 | 7.04E−03 | 1.89E−03 | −1 | 1.972 | RNASEH2A |
| 203071_at | NM_004636 | 39 | 2.10E−02 | 2.60E−02 | 2.61E−02 | −1 | 1.974 | SEMA3B |
| 212242_at | AL565074 | 40 | 3.70E−03 | 2.49E−03 | 2.51E−04 | −1 | 1.974 | TUBA1 |
| 202732_at | NM_007066 | 41 | 2.10E−02 | 1.14E−02 | 3.93E−03 | −1 | 1.990 | PKIG |
| 205013_s_at | NM_000675 | 42 | 2.10E−02 | 2.60E−02 | 3.20E−02 | −1 | 1.993 | ADORA2A |
| 221792_at | AW118072 | 43 | 2.10E−02 | 7.04E−03 | 1.04E−02 | −1 | 2.037 | RAB6B |
| 208135_at | NM_006481 | 44 | 2.10E−02 | 3.03E−02 | 3.31E−02 | −1 | 2.043 | TCF2 |
| 208059_at | NM_005201 | 45 | 3.70E−03 | 3.70E−03 | 4.63E−02 | −1 | 2.050 | CCR8 |
| 207532_at | NM_006891 | 46 | 3.70E−03 | 3.70E−03 | 2.66E−02 | −1 | 2.063 | CRYGD |
| 216699_s_at | L10038 | 47 | 2.10E−02 | 7.04E−03 | 5.23E−03 | −1 | 2.069 | KLK1 |
| 202555_s_at | NM_005965 | 48 | 2.10E−02 | 2.60E−02 | 1.97E−03 | −1 | 2.077 | MYLK |
| 203193_at | NM_004451 | 49 | 2.10E−02 | 7.04E−03 | 9.18E−03 | −1 | 2.119 | ESRRA |
| 215766_at | AL096729 | 50 | 2.10E−02 | 7.04E−03 | 2.58E−03 | −1 | 2.122 | GSTA1 |
| 201023_at | NM_005642 | 51 | 3.70E−03 | 2.49E−03 | 1.34E−03 | −1 | 2.126 | TAF7 |
| 204316_at | W19676 | 52 | 2.10E−02 | 2.17E−02 | 1.11E−02 | −1 | 2.136 | RGS10 |
| 204319_s_at | NM_002925 | 53 | 2.10E−02 | 2.17E−02 | 1.11E−02 | −1 | 2.136 | RGS10 |
| 209477_at | BC000738 | 54 | 2.10E−02 | 1.14E−02 | 2.29E−03 | −1 | 2.166 | EMD |
| 216283_s_at | X64116 | 55 | 2.10E−02 | 3.03E−02 | 3.14E−02 | −1 | 2.169 | PVR |
| 202799_at | NM_006012 | 56 | 3.70E−03 | 2.49E−03 | 8.46E−04 | −1 | 2.171 | CLPP |
| 202127_at | AB011108 | 57 | 2.10E−02 | 7.04E−03 | 4.54E−02 | −1 | 2.195 | PRPF4B |
| 200647_x_at | NM_003752 | 58 | 2.10E−02 | 7.04E−03 | 2.87E−02 | −1 | 2.196 | EIF3S8 |
| 210949_s_at | BC000533 | 59 | 2.10E−02 | 7.04E−03 | 2.87E−02 | −1 | 2.196 | EIF3S8 |
| 215230_x_at | AA679705 | 60 | 2.10E−02 | 7.04E−03 | 2.87E−02 | −1 | 2.196 | EIF3S8 |
| 210328_at | AF101477 | 61 | 2.10E−02 | 2.60E−02 | 3.52E−02 | −1 | 2.260 | GNMT |
| 211988_at | BG289800 | 62 | 4.11E−04 | 2.17E−04 | 2.74E−04 | −1 | 2.265 | SMARCE1 |
| 215781_s_at | D87012 | 63 | 2.10E−02 | 2.60E−02 | 2.98E−02 | −1 | 2.273 | TOP3B |
| 204163_at | NM_007046 | 64 | 2.10E−02 | 3.03E−02 | 2.63E−02 | −1 | 2.319 | EMILIN1 |
| 207954_at | NM_002050 | 65 | 3.70E−03 | 3.70E−03 | 1.50E−03 | −1 | 2.323 | GATA2 |
| 210358_x_at | BC002557 | 66 | 3.70E−03 | 3.70E−03 | 1.50E−03 | −1 | 2.323 | GATA2 |
| 222206_s_at | AA781143 | 67 | 2.10E−02 | 7.04E−03 | 8.50E−03 | −1 | 2.357 | NICALIN |
| 200949_x_at | NM_001023 | 68 | 2.10E−02 | 1.14E−02 | 4.42E−02 | −1 | 2.368 | RPS20 |
| 214003_x_at | BF184532 | 69 | 2.10E−02 | 1.14E−02 | 4.42E−02 | −1 | 2.368 | RPS20 |
| 203701_s_at | NM_017722 | 70 | 2.10E−02 | 1.14E−02 | 8.29E−03 | −1 | 2.375 | FLJ20244 |
| 210463_x_at | BC002492 | 71 | 2.10E−02 | 1.14E−02 | 8.29E−03 | −1 | 2.375 | FLJ20244 |
| 204703_at | NM_006531 | 72 | 2.10E−02 | 7.04E−03 | 1.46E−02 | −1 | 2.398 | TTC10 |
| 216582_at | AL021808 | 73 | 2.10E−02 | 2.60E−02 | 6.09E−03 | −1 | 2.451 | AL021808 |
| 208687_x_at | AF352832 | 74 | 3.70E−03 | 3.70E−03 | 3.18E−02 | −1 | 2.472 | HSPA8 |
| 202314_at | NM_000786 | 75 | 2.10E−02 | 2.60E−02 | 1.22E−02 | −1 | 2.509 | CYP51A1 |
| 214095_at | AW190316 | 76 | 2.10E−02 | 2.60E−02 | 3.91E−03 | −1 | 2.535 | SHMT2 |
| 214096_s_at | AW190316 | 77 | 2.10E−02 | 2.60E−02 | 3.91E−03 | −1 | 2.535 | SHMT2 |
| 214948_s_at | AL050136 | 78 | 2.10E−02 | 2.17E−02 | 4.68E−03 | −1 | 2.568 | TMF1 |
| 206879_s_at | NM_013982 | 79 | 2.10E−02 | 7.04E−03 | 1.57E−02 | −1 | 2.618 | NRG2 |
| 205463_s_at | NM_002607 | 80 | 3.70E−03 | 3.70E−03 | 7.59E−04 | −1 | 2.639 | PDGFA |
| 205022_s_at | NM_005197 | 81 | 3.70E−03 | 2.49E−03 | 8.78E−03 | −1 | 2.655 | CHES1 |
| 203801_at | BG254653 | 82 | 2.10E−02 | 7.04E−03 | 8.11E−03 | −1 | 2.671 | MRPS14 |
| 215746_at | L34409 | 83 | 2.10E−02 | 3.03E−02 | 1.80E−02 | −1 | 2.676 | TETRAN |
| 201418_s_at | NM_003107 | 84 | 3.70E−03 | 1.36E−03 | 1.33E−03 | −1 | 2.721 | SOX4 |
| 202410_x_at | NM_000612 | 85 | 3.70E−03 | 1.36E−03 | 1.21E−02 | −1 | 2.795 | IGF2 |
| 204400_at | NM_005864 | 86 | 3.70E−03 | 1.36E−03 | 6.24E−04 | −1 | 2.815 | EFS |
| 210880_s_at | AB001467 | 87 | 3.70E−03 | 1.36E−03 | 6.24E−04 | −1 | 2.815 | EFS |
| 200790_at | NM_002539 | 88 | 2.10E−02 | 2.60E−02 | 6.27E−03 | −1 | 2.817 | ODC1 |
| 203339_at | AI887457 | 89 | 2.10E−02 | 7.04E−03 | 1.11E−02 | −1 | 2.853 | SLC25A12 |
| 203340_s_at | AI887457 | 90 | 2.10E−02 | 7.04E−03 | 1.11E−02 | −1 | 2.853 | SLC25A12 |
| 201513_at | NM_004622 | 91 | 2.10E−02 | 3.03E−02 | 1.07E−02 | −1 | 2.915 | TSN |
| 204159_at | NM_001262 | 92 | 2.10E−02 | 7.04E−03 | 2.76E−03 | −1 | 2.920 | CDKN2C |
| 211792_s_at | U17074 | 93 | 2.10E−02 | 7.04E−03 | 2.76E−03 | −1 | 2.920 | CDKN2C |
| 209320_at | AF033861 | 94 | 2.10E−02 | 1.14E−02 | 2.07E−03 | −1 | 2.975 | ADCY3 |
| 209480_at | M16276 | 95 | 4.11E−04 | 2.17E−04 | 2.15E−05 | −1 | 2.983 | MHC II, DQ |
| | | | | | | | | beta 1 |
| 212999_x_at | AW276186 | 96 | 4.11E−04 | 2.17E−04 | 2.15E−05 | −1 | 2.983 | MHC II, DQ |
| | | | | | | | | beta 1 |
| 214613_at | AW024085 | 97 | 2.10E−02 | 7.04E−03 | 1.72E−02 | −1 | 3.021 | GPR3 |
| 201269_s_at | AB028991 | 98 | 2.10E−02 | 2.17E−02 | 3.88E−02 | −1 | 3.142 | KIAA1068 |
| 209361_s_at | BC004153 | 99 | 3.70E−03 | 1.36E−03 | 1.60E−02 | −1 | 3.183 | PCBP4 |
| 213840_s_at | R68573 | 100 | 2.10E−02 | 3.03E−02 | 1.34E−02 | −1 | 3.196 | — |
| 204895_x_at | NM_004532 | 101 | 3.70E−03 | 3.70E−03 | 2.34E−02 | −1 | 3.206 | MUC4 |
| 217109_at | AJ242547 | 102 | 3.70E−03 | 3.70E−03 | 2.34E−02 | −1 | 3.206 | MUC4 |
| 217110_s_at | AJ242547 | 103 | 3.70E−03 | 3.70E−03 | 2.34E−02 | −1 | 3.206 | MUC4 |
| 212852_s_at | AL538601 | 104 | 3.70E−03 | 1.36E−03 | 1.29E−03 | −1 | 3.225 | SSA2 |
| 206759_at | NM_002002 | 105 | 2.10E−02 | 1.14E−02 | 5.20E−03 | −1 | 3.227 | FCER2 |
| 206760_s_at | NM_002002 | 106 | 2.10E−02 | 1.14E−02 | 5.20E−03 | −1 | 3.227 | FCER2 |
| 203422_at | NM_002691 | 107 | 2.10E−02 | 1.14E−02 | 1.86E−02 | −1 | 3.245 | POLD1 |
| 202766_s_at | NM_000138 | 108 | 3.70E−03 | 3.70E−03 | 2.33E−02 | −1 | 3.303 | FBN1 |
| 216065_at | AL031228 | 109 | 2.10E−02 | 3.03E−02 | 2.88E−02 | −1 | 3.528 | BING5 |
| 202140_s_at | NM_003992 | 110 | 2.10E−02 | 1.14E−02 | 1.85E−03 | −1 | 3.579 | CLK3 |
| 209107_x_at | U19179 | 111 | 3.70E−03 | 1.36E−03 | 8.37E−04 | −1 | 3.612 | NCOA1 |
| 210249_s_at | U59302 | 112 | 3.70E−03 | 1.36E−03 | 8.37E−04 | −1 | 3.612 | NCOA1 |
| 208041_at | NM_002929 | 113 | 3.70E−03 | 1.36E−03 | 5.34E−03 | −1 | 3.659 | GRK1 |
| 202554_s_at | AL527430 | 114 | 2.10E−02 | 2.60E−02 | 1.26E−02 | −1 | 3.775 | GSTM3 |
| 213815_x_at | AI913329 | 115 | 2.10E−02 | 2.60E−02 | 3.04E−03 | −1 | 3.820 | NY-REN 24 |
| 214892_x_at | BC004262 | 116 | 2.10E−02 | 2.60E−02 | 3.04E−03 | −1 | 3.820 | C19orf29 |
| 215954_s_at | AI200896 | 117 | 2.10E−02 | 2.60E−02 | 3.04E−03 | −1 | 3.820 | NY-REN 24 |
| 204144_s_at | NM_004204 | 118 | 3.70E−03 | 1.36E−03 | 9.11E−04 | −1 | 3.873 | PIGQ |
| 206592_s_at | NM_003938 | 119 | 3.70E−03 | 3.70E−03 | 3.71E−03 | −1 | 3.881 | AP3D1 |
| 200936_at | NM_000973 | 120 | 3.70E−03 | 2.49E−03 | 1.59E−03 | −1 | 3.915 | RPL8 |
| 204065_at | NM_004854 | 121 | 3.70E−03 | 1.36E−03 | 6.52E−03 | −1 | 4.113 | CHST10 |
| 206327_s_at | NM_004933 | 122 | 2.10E−02 | 2.17E−02 | 1.74E−02 | −1 | 4.164 | CDH15 |
| 206328_at | NM_004933 | 123 | 2.10E−02 | 2.17E−02 | 1.74E−02 | −1 | 4.164 | CDH15 |
| 205608_s_at | U83508 | 124 | 3.70E−03 | 2.49E−03 | 1.47E−03 | −1 | 4.205 | ANGPT1 |
| 204197_s_at | NM_004350 | 125 | 2.10E−02 | 3.03E−02 | 2.22E−02 | −1 | 4.271 | RUNX3 |
| 205683_x_at | NM_003294 | 126 | 2.10E−02 | 2.17E−02 | 8.61E−03 | −1 | 4.292 | TPSAB1 |
| 207134_x_at | NM_024164 | 127 | 2.10E−02 | 2.17E−02 | 8.61E−03 | −1 | 4.292 | TPSB2 |
| 216474_x_at | AF206667 | 128 | 2.10E−02 | 2.17E−02 | 8.61E−03 | −1 | 4.292 | TPSAB1, |
| | | | | | | | | TPSB2 |
| 214487_s_at | NM_002886 | 129 | 2.10E−02 | 2.60E−02 | 1.21E−02 | −1 | 4.296 | RAP2A, RAP2B |
| 214488_at | NM_002886 | 130 | 2.10E−02 | 2.60E−02 | 1.21E−02 | −1 | 4.296 | RAP2B |
| 212674_s_at | AK002076 | 131 | 3.70E−03 | 3.70E−03 | 2.98E−02 | −1 | 4.426 | DHX30 |
| 209253_at | AF037261 | 132 | 2.10E−02 | 2.60E−02 | 7.17E−03 | −1 | 4.520 | SCAM-1 |
| 210619_s_at | AF173154 | 133 | 2.10E−02 | 3.03E−02 | 9.84E−03 | −1 | 4.648 | HYAL1 |
| 213221_s_at | AB018324 | 134 | 3.70E−03 | 3.70E−03 | 2.54E−03 | −1 | 4.758 | SIK2 |
| 216939_s_at | Y08756 | 135 | 2.10E−02 | 7.04E−03 | 6.08E−03 | −1 | 4.910 | HTR4, |
| | | | | | | | | KIAA1985 |
| 202415_s_at | NM_012267 | 136 | 2.10E−02 | 7.04E−03 | 1.51E−02 | −1 | 4.922 | HSPBP1 |
| 205798_at | NM_002185 | 137 | 2.10E−02 | 3.03E−02 | 2.08E−02 | −1 | 5.081 | IL7R |
| 207938_at | NM_015886 | 138 | 2.10E−02 | 2.60E−02 | 4.15E−02 | −1 | 5.111 | PI15 |
| 217060_at | U03115 | 139 | 2.10E−02 | 3.03E−02 | 4.35E−02 | −1 | 5.115 | TCRBV |
| 207900_at | NM_002987 | 140 | 2.10E−02 | 1.14E−02 | 6.92E−03 | −1 | 5.125 | CCL17 |
| 205189_s_at | NM_000136 | 141 | 2.10E−02 | 1.14E−02 | 1.89E−02 | −1 | 5.128 | FANCC |
| 208009_s_at | NM_014448 | 142 | 2.10E−02 | 2.17E−02 | 2.24E−02 | −1 | 5.145 | ARHGEF16 |
| 206148_at | NM_002183 | 143 | 2.10E−02 | 3.03E−02 | 2.62E−02 | −1 | 5.170 | IL3RA |
| 204816_s_at | AI924903 | 144 | 2.10E−02 | 3.03E−02 | 8.65E−03 | −1 | 5.215 | DHX34 |
| 210306_at | U89358 | 145 | 3.70E−03 | 3.70E−03 | 7.60E−04 | −1 | 5.331 | L3MBTL |
| 206398_s_at | NM_001770 | 146 | 2.10E−02 | 1.14E−02 | 2.36E−03 | −1 | 5.693 | CD19 |
| 212540_at | BG476661 | 147 | 2.10E−02 | 2.17E−02 | 7.82E−03 | −1 | 5.949 | CDC34 |
| 207694_at | NM_000307 | 148 | 2.10E−02 | 1.14E−02 | 5.97E−03 | −1 | 6.007 | POU3F4 |
| 202268_s_at | NM_003905 | 149 | 2.10E−02 | 2.60E−02 | 1.30E−02 | −1 | 6.029 | APPBP1 |
| 202909_at | NM_014805 | 150 | 2.10E−02 | 3.03E−02 | 1.30E−02 | −1 | 6.919 | EPM2AIP1 |
| 205798_at | NM_002185 | 151 | 2.10E−02 | 3.03E−02 | 1.54E−02 | −1 | 6.948 | IL7R |
| 203421_at | NM_006034 | 152 | 2.10E−02 | 2.60E−02 | 1.35E−02 | −1 | 6.959 | TP53I11 |
| 207403_at | NM_003604 | 153 | 2.10E−02 | 2.60E−02 | 1.79E−03 | −1 | 6.981 | IRS4 |
| 202312_s_at | K01228 | 154 | 2.10E−02 | 3.03E−02 | 3.84E−02 | −1 | 7.027 | COL1A1 |
| 201497_x_at | NM_022844 | 155 | 2.10E−02 | 3.03E−02 | 1.40E−02 | −1 | 7.285 | MYH11 |
| 203683_s_at | NM_003377 | 156 | 2.10E−02 | 3.03E−02 | 4.63E−03 | −1 | 7.314 | VEGFB |
| 210438_x_at | M25077 | 157 | 2.10E−02 | 1.14E−02 | 1.40E−02 | −1 | 8.214 | SSA2 |
| 205805_s_at | NM_005012 | 158 | 2.17E−05 | 2.17E−05 | 2.07E−05 | −1 | 8.307 | ROR1 |
| 207222_at | NM_003561 | 159 | 2.10E−02 | 3.03E−02 | 8.61E−03 | −1 | 9.192 | PLA2G10 |
| 203329_at | NM_002845 | 160 | 4.11E−04 | 2.17E−04 | 3.04E−05 | −1 | 9.736 | PTPRM |
| 207036_x_at | NM_000836 | 161 | 2.10E−02 | 1.14E−02 | 1.43E−02 | −1 | 9.843 | GRIN2D |
| 208580_x_at | NM_021968 | 162 | 3.70E−03 | 2.49E−03 | 7.90E−03 | −1 | 10.804 | HIST1H4J, |
| | | | | | | | | HIST1H4K |
| 214463_x_at | NM_003541 | 163 | 3.70E−03 | 2.49E−03 | 7.90E−03 | −1 | 10.804 | HIST1H4J, |
| | | | | | | | | HIST1H4K |
| 208091_s_at | NM_030796 | 164 | 2.10E−02 | 7.04E−03 | 6.78E−03 | −1 | 10.908 | DKFZP564K0822 |
| 206516_at | NM_000479 | 165 | 4.11E−04 | 4.11E−04 | 8.60E−04 | −1 | 11.814 | AMH |
| 200834_s_at | NM_001024 | 166 | 3.70E−03 | 3.70E−03 | 1.35E−02 | −1 | 11.908 | RPS21 |
| 208105_at | NM_000164 | 167 | 2.10E−02 | 2.60E−02 | 3.55E−03 | −1 | 12.069 | GIPR |
| 207959_s_at | NM_004662 | 168 | 2.10E−02 | 2.60E−02 | 4.54E−02 | −1 | 12.457 | DNAH9 |
| 210345_s_at | AF257737 | 169 | 2.10E−02 | 2.60E−02 | 4.54E−02 | −1 | 12.457 | DNAH9 |
| 202315_s_at | NM_004327 | 170 | 4.11E−04 | 2.17E−04 | 3.36E−06 | −1 | 12.559 | BCR |
| 208733_at | AW301641 | 171 | 3.70E−03 | 1.36E−03 | 6.96E−04 | −1 | 12.569 | RAB2 |
| 221847_at | BF665706 | 172 | 2.10E−02 | 2.60E−02 | 5.69E−03 | −1 | 13.019 | — |
| 214481_at | NM_003514 | 173 | 2.10E−02 | 3.03E−02 | 1.06E−02 | −1 | 13.748 | HIST1H2AM |
| 214644_at | BF061074 | 174 | 3.70E−03 | 2.49E−03 | 1.08E−03 | −1 | 14.563 | HIST1H2AK |
| 217192_s_at | AL022067 | 175 | 2.10E−02 | 1.14E−02 | 7.64E−03 | −1 | 14.756 | PRDM1 |
| 220937_s_at | NM_014403 | 176 | 2.10E−02 | 1.14E−02 | 6.81E−03 | −1 | 15.370 | SIAT7D |
| 221551_x_at | AW044319 | 177 | 2.10E−02 | 1.14E−02 | 6.81E−03 | −1 | 15.370 | SIAT7D |
| 215266_at | AL096732 | 178 | 2.10E−02 | 2.60E−02 | 8.04E−03 | −1 | 17.220 | DNAH3 |
| 203851_at | NM_002178 | 179 | 2.10E−02 | 2.17E−02 | 4.92E−03 | −1 | 17.962 | IGFBP6 |
| 209466_x_at | M57399 | 180 | 2.10E−02 | 7.04E−03 | 6.13E−03 | −1 | 21.339 | PTN |
| 211737_x_at | BC005916 | 181 | 2.10E−02 | 7.04E−03 | 6.13E−03 | −1 | 21.339 | PTN |
| 209686_at | BC001766 | 182 | 2.10E−02 | 3.03E−02 | 8.52E−03 | −1 | 22.433 | S100B |
| 216867_s_at | X03795 | 183 | 2.10E−02 | 2.60E−02 | 1.47E−02 | −1 | 26.553 | PDGFA |
| 210229_s_at | M11734 | 184 | 2.10E−02 | 2.17E−02 | 1.02E−02 | −1 | 36.065 | CSF2 |
| 209651_at | BC001830 | 185 | 2.10E−02 | 3.03E−02 | 6.32E−03 | −1 | 42.216 | TGFB1I1 |
| 206616_s_at | AF155382 | 186 | 4.11E−04 | 4.11E−04 | 8.65E−04 | −1 | 59.650 | ADAM22 |
| 208226_x_at | NM_004194 | 187 | 4.11E−04 | 4.11E−04 | 8.65E−04 | −1 | 59.650 | ADAM22 |
| 208227_x_at | NM_021721 | 188 | 4.11E−04 | 4.11E−04 | 8.65E−04 | −1 | 59.650 | ADAM22 |
| 208237_x_at | NM_021722 | 189 | 4.11E−04 | 4.11E−04 | 8.65E−04 | −1 | 59.650 | ADAM22 |
| 216993_s_at | U32169 | 190 | 2.10E−02 | 2.60E−02 | 1.55E−02 | −1 | 65.430 | COL11A2 |
| 209726_at | AB018195 | 191 | 3.70E−03 | 1.36E−03 | 1.03E−02 | −1 | 74.847 | CA11 |
| 206944_at | AF007141 | 192 | 2.10E−02 | 7.04E−03 | 3.15E−02 | −1 | 382.037 | HTR6 |
| 203503_s_at | NM_004565 | 193 | 2.10E−02 | 3.03E−02 | 4.90E−02 | −1 | NA | PEX14 |
| 214994_at | BF508948 | 194 | 3.70E−03 | 2.49E−03 | 1.12E−03 | 1 | 1.010 | APOBEC3F |
| 202270_at | NM_002053 | 195 | 3.70E−03 | 3.70E−03 | 2.70E−03 | 1 | 1.012 | GBP1 |
| 201975_at | NM_002956 | 196 | 4.11E−04 | 2.17E−04 | 4.98E−04 | 1 | 1.070 | RSN |
| 206584_at | NM_015364 | 197 | 4.11E−04 | 2.17E−04 | 1.05E−02 | 1 | 1.095 | LY96 |
| 212561_at | AA349595 | 198 | 2.10E−02 | 3.03E−02 | 3.47E−02 | 1 | 1.126 | RAB6IP1 |
| 209413_at | BC002431 | 199 | 3.70E−03 | 2.49E−03 | 4.18E−04 | 1 | 1.156 | B4GALT2 |
| 214507_s_at | NM_014285 | 200 | 3.70E−03 | 2.49E−03 | 8.67E−04 | 1 | 1.249 | EXOSC2 |
| 212819_at | AF055024 | 201 | 3.70E−03 | 1.36E−03 | 1.93E−03 | 1 | 1.260 | ASB1 |
| 206364_at | NM_014875 | 202 | 2.10E−02 | 3.03E−02 | 9.68E−03 | 1 | 1.328 | KIF14 |
| 206421_s_at | NM_003784 | 203 | 2.10E−02 | 2.60E−02 | 3.81E−02 | 1 | 1.388 | SERPINB7 |
| 209961_s_at | M60718 | 204 | 2.10E−02 | 2.60E−02 | 4.30E−02 | 1 | 1.389 | HGF |
| 204202_at | NM_017604 | 205 | 2.10E−02 | 7.04E−03 | 8.75E−03 | 1 | 1.413 | IQCE |
| 207872_s_at | NM_006863 | 206 | 3.70E−03 | 2.49E−03 | 6.77E−04 | 1 | 1.434 | LILRA1 |
| 215906_at | S65921 | 207 | 2.10E−02 | 3.03E−02 | 3.41E−02 | 1 | 1.459 | ACCLC |
| 204849_at | NM_006602 | 208 | 3.70E−03 | 3.70E−03 | 2.40E−02 | 1 | 1.506 | TCFL5 |
| 211832_s_at | AF201370 | 209 | 2.10E−02 | 7.04E−03 | 1.33E−02 | 1 | 1.527 | MDM2 |
| 207867_at | NM_006193 | 210 | 2.10E−02 | 2.60E−02 | 2.32E−02 | 1 | 1.539 | PAX4 |
| 203501_at | NM_006102 | 211 | 3.70E−03 | 3.70E−03 | 3.39E−03 | 1 | 1.549 | PGCP |
| 208454_s_at | NM_016134 | 212 | 3.70E−03 | 3.70E−03 | 3.39E−03 | 1 | 1.549 | PGCP |
| 206426_at | NM_005511 | 213 | 2.10E−02 | 2.60E−02 | 4.10E−02 | 1 | 1.558 | MLANA |
| 208193_at | NM_000590 | 214 | 2.10E−02 | 2.60E−02 | 2.01E−02 | 1 | 1.561 | IL9 |
| 201538_s_at | AL048503 | 215 | 2.10E−02 | 7.04E−03 | 3.54E−02 | 1 | 1.600 | DUSP3 |
| 214872_at | AL080129 | 216 | 2.10E−02 | 1.14E−02 | 1.73E−03 | 1 | 1.613 | Rif1 |
| 205885_s_at | NM_000885 | 217 | 2.10E−02 | 1.14E−02 | 5.96E−03 | 1 | 1.631 | ITGA4 |
| 205062_x_at | NM_002892 | 218 | 2.10E−02 | 1.14E−02 | 2.08E−02 | 1 | 1.637 | ARID4A |
| 209245_s_at | AB014606 | 219 | 2.10E−02 | 2.60E−02 | 8.48E−03 | 1 | 1.645 | KIF1C |
| 212976_at | R41498 | 220 | 2.10E−02 | 1.14E−02 | 2.83E−02 | 1 | 1.645 | TA-LRRP |
| 200797_s_at | AI275690 | 221 | 3.70E−03 | 3.70E−03 | 4.15E−02 | 1 | 1.650 | MCL1 |
| 203266_s_at | NM_003010 | 222 | 2.10E−02 | 1.14E−02 | 2.07E−02 | 1 | 1.655 | MAP2K4 |
| 208042_at | NM_013303 | 223 | 3.70E−03 | 1.36E−03 | 7.53E−03 | 1 | 1.655 | VG5Q |
| 207037_at | NM_003839 | 224 | 2.10E−02 | 2.17E−02 | 7.68E−03 | 1 | 1.667 | TNFRSF11A |
| 206911_at | NM_005082 | 225 | 2.10E−02 | 7.04E−03 | 2.82E−03 | 1 | 1.671 | TRIM25 |
| 208359_s_at | NM_004981 | 226 | 2.10E−02 | 2.60E−02 | 2.42E−02 | 1 | 1.674 | KCNJ4 |
| 211451_s_at | U24056 | 227 | 2.10E−02 | 2.60E−02 | 2.42E−02 | 1 | 1.674 | KCNJ4 |
| 212882_at | AB018338 | 228 | 2.10E−02 | 2.60E−02 | 1.03E−02 | 1 | 1.676 | KLHL18 |
| 205141_at | NM_001145 | 229 | 2.10E−02 | 7.04E−03 | 9.28E−03 | 1 | 1.713 | ANG |
| 216695_s_at | AF082559 | 230 | 3.70E−03 | 1.36E−03 | 3.13E−03 | 1 | 1.721 | TNKS |
| 205312_at | NM_003120 | 231 | 2.10E−02 | 2.60E−02 | 1.99E−02 | 1 | 1.722 | SPI1 |
| 205990_s_at | NM_003392 | 232 | 2.10E−02 | 3.03E−02 | 3.56E−02 | 1 | 1.746 | WNT5A |
| 202260_s_at | NM_003165 | 233 | 3.70E−03 | 3.70E−03 | 2.60E−03 | 1 | 1.747 | STXBP1 |
| 214624_at | AA548647 | 234 | 3.70E−03 | 1.36E−03 | 1.08E−02 | 1 | 1.750 | UPK1A |
| 211561_x_at | L35253 | 235 | 4.11E−04 | 2.17E−04 | 9.33E−05 | 1 | 1.760 | MAPK14 |
| 216817_s_at | AJ302604 | 236 | 2.10E−02 | 1.14E−02 | 7.08E−03 | 1 | 1.764 | OR2H1 |
| 207044_at | NM_000461 | 237 | 2.10E−02 | 7.04E−03 | 1.51E−02 | 1 | 1.766 | THRB |
| 208724_s_at | BC000905 | 238 | 3.70E−03 | 3.70E−03 | 3.32E−02 | 1 | 1.770 | RAB1A |
| 214111_at | AF070577 | 239 | 2.10E−02 | 7.04E−03 | 4.11E−02 | 1 | 1.774 | AF070577 |
| 205261_at | NM_002630 | 240 | 2.10E−02 | 7.04E−03 | 1.86E−02 | 1 | 1.781 | PGC |
| 207406_at | NM_000780 | 241 | 2.10E−02 | 7.04E−03 | 1.64E−02 | 1 | 1.787 | CYP7A1 |
| 206218_at | NM_002364 | 242 | 2.10E−02 | 7.04E−03 | 9.00E−04 | 1 | 1.791 | MAGEB2 |
| 207010_at | NM_000812 | 243 | 2.10E−02 | 2.60E−02 | 4.13E−03 | 1 | 1.801 | GABRB1 |
| 217301_x_at | X71810 | 244 | 2.10E−02 | 3.03E−02 | 6.23E−03 | 1 | 1.822 | RBBP4 |
| 211108_s_at | U31601 | 245 | 3.70E−03 | 3.70E−03 | 5.90E−03 | 1 | 1.826 | JAK3 |
| 211109_at | U31601 | 246 | 3.70E−03 | 3.70E−03 | 5.90E−03 | 1 | 1.826 | JAK3 |
| 206902_s_at | NM_005728 | 247 | 3.70E−03 | 1.36E−03 | 1.14E−04 | 1 | 1.853 | ENDOGL1 |
| 206903_at | NM_005728 | 248 | 3.70E−03 | 1.36E−03 | 1.14E−04 | 1 | 1.853 | ENDOGL2 |
| 209260_at | BC000329 | 249 | 2.10E−02 | 3.03E−02 | 1.58E−02 | 1 | 1.879 | SFN |
| 214099_s_at | AK001619 | 250 | 3.70E−03 | 2.49E−03 | 1.54E−02 | 1 | 1.883 | PDE4DIP |
| 201453_x_at | NM_005614 | 251 | 2.10E−02 | 3.03E−02 | 1.52E−02 | 1 | 1.891 | RHEB |
| 213404_s_at | BF033683 | 252 | 2.10E−02 | 3.03E−02 | 1.52E−02 | 1 | 1.891 | RHEB |
| 202805_s_at | NM_004996 | 253 | 4.11E−04 | 4.11E−04 | 6.42E−04 | 1 | 1.892 | ABCC1 |
| 215008_at | AA582404 | 254 | 2.10E−02 | 7.04E−03 | 2.49E−03 | 1 | 1.897 | TLL2 |
| 205619_s_at | NM_004527 | 255 | 2.10E−02 | 3.03E−02 | 1.38E−02 | 1 | 1.905 | MEOX1 |
| 215130_s_at | AC002550 | 256 | 2.10E−02 | 3.03E−02 | 4.39E−02 | 1 | 1.906 | MGC35048 |
| 215131_at | AC002550 | 257 | 2.10E−02 | 3.03E−02 | 4.39E−02 | 1 | 1.906 | MGC35048 |
| 207675_x_at | NM_003976 | 258 | 2.10E−02 | 7.04E−03 | 4.31E−03 | 1 | 1.922 | ARTN |
| 216052 x_at | AF115765 | 259 | 2.10E−02 | 7.04E−03 | 4.31E−03 | 1 | 1.922 | ARTN |
| 205962_at | NM_002577 | 260 | 2.10E−02 | 1.14E−02 | 8.39E−04 | 1 | 1.930 | PAK2 |
| 207143_at | NM_001259 | 261 | 3.70E−03 | 1.36E−03 | 1.29E−02 | 1 | 1.932 | CDK6 |
| 203755_at | NM_001211 | 262 | 4.11E−04 | 2.17E−04 | 5.38E−04 | 1 | 1.941 | BUB1B |
| 202166_s_at | NM_006241 | 263 | 3.70E−03 | 3.70E−03 | 1.74E−02 | 1 | 1.948 | PPP1R2 |
| 206570_s_at | NM_002785 | 264 | 2.10E−02 | 2.17E−02 | 1.17E−02 | 1 | 1.953 | PSG8, PSG4, |
| | | | | | | | | PSG9, PSG3, |
| | | | | | | | | PSG7 |
| 202886_s_at | M65254 | 265 | 2.10E−02 | 7.04E−03 | 5.42E−03 | 1 | 1.959 | PPP2R1B |
| 200889_s_at | NM_003144 | 266 | 3.70E−03 | 2.49E−03 | 4.88E−04 | 1 | 1.965 | SSR1 |
| 206942_s_at | NM_002674 | 267 | 3.70E−03 | 1.36E−03 | 6.48E−03 | 1 | 1.969 | PMCH |
| 207862_at | NM_006760 | 268 | 2.10E−02 | 7.04E−03 | 2.52E−03 | 1 | 1.976 | UPK2 |
| 200771_at | NM_002293 | 269 | 2.10E−02 | 1.14E−02 | 3.76E−03 | 1 | 1.978 | LAMC1 |
| 206145_at | AF178841 | 270 | 2.10E−02 | 3.03E−02 | 9.28E−03 | 1 | 1.995 | RHAG |
| 206609_at | NM_005462 | 271 | 2.10E−02 | 7.04E−03 | 7.65E−04 | 1 | 2.006 | MAGEC1 |
| 215116_s_at | AF035321 | 272 | 2.10E−02 | 7.04E−03 | 3.89E−02 | 1 | 2.021 | DNM1 |
| 208229_at | NM_022975 | 273 | 2.10E−02 | 7.04E−03 | 1.97E−03 | 1 | 2.048 | FGFR2 |
| 211349_at | AB001328 | 274 | 2.10E−02 | 2.60E−02 | 6.74E−04 | 1 | 2.049 | SLC15A1 |
| 207654_x_at | NM_001938 | 275 | 3.70E−03 | 1.36E−03 | 3.30E−03 | 1 | 2.070 | DR1 |
| 209188_x_at | AW516932 | 276 | 3.70E−03 | 1.36E−03 | 3.30E−03 | 1 | 2.070 | DR1 |
| 216652_s_at | AL137673 | 277 | 3.70E−03 | 1.36E−03 | 3.30E−03 | 1 | 2.070 | DR1 |
| 214565_s_at | NM_012390 | 278 | 2.10E−02 | 2.17E−02 | 2.50E−03 | 1 | 2.092 | PROL3, PROL5 |
| 214566_at | NM_012390 | 279 | 2.10E−02 | 2.17E−02 | 2.50E−03 | 1 | 2.092 | PROL5 |
| 215719_x_at | X83493 | 280 | 3.70E−03 | 1.36E−03 | 4.50E−04 | 1 | 2.136 | TNFRSF6 |
| 216252_x_at | Z70519 | 281 | 2.10E−02 | 7.04E−03 | 2.33E−03 | 1 | 2.136 | TNFRSF6 |
| 208405_s_at | NM_006016 | 282 | 3.70E−03 | 3.70E−03 | 1.33E−03 | 1 | 2.137 | CD164 |
| 216857_at | L48728 | 283 | 2.10E−02 | 1.14E−02 | 1.47E−03 | 1 | 2.147 | TCRB PS7 |
| 216865_at | M64108 | 284 | 3.70E−03 | 3.70E−03 | 6.10E−03 | 1 | 2.151 | COL14A1 |
| 216866_s_at | M64108 | 285 | 3.70E−03 | 3.70E−03 | 6.10E−03 | 1 | 2.151 | COL14A1 |
| 212942_s_at | AB033025 | 286 | 3.70E−03 | 1.36E−03 | 8.72E−04 | 1 | 2.192 | KIAA1199 |
| 209737_at | AB014605 | 287 | 3.70E−03 | 1.36E−03 | 6.90E−04 | 1 | 2.199 | AIP1 |
| 207325_x_at | NM_004988 | 288 | 2.10E−02 | 7.04E−03 | 2.44E−02 | 1 | 2.232 | MAGEA1 |
| 215017_s_at | AW270932 | 289 | 3.70E−03 | 3.70E−03 | 3.32E−04 | 1 | 2.233 | C1orf39 |
| 203806_s_at | NM_000135 | 290 | 2.10E−02 | 7.04E−03 | 2.51E−03 | 1 | 2.249 | FANCA |
| 203440_at | M34064 | 291 | 2.10E−02 | 2.60E−02 | 1.61E−02 | 1 | 2.355 | CDH2 |
| 205339_at | NM_003035 | 292 | 2.10E−02 | 7.04E−03 | 8.46E−04 | 1 | 2.355 | SIL |
| 209648_x_at | AL136896 | 293 | 3.70E−03 | 1.36E−03 | 3.23E−03 | 1 | 2.357 | SOCS5 |
| 205429_s_at | NM_016447 | 294 | 2.10E−02 | 7.04E−03 | 1.09E−03 | 1 | 2.361 | MPP6 |
| 208340_at | NM_003723 | 295 | 3.70E−03 | 1.36E−03 | 1.07E−03 | 1 | 2.369 | CASP13 |
| 211203_s_at | U07820 | 296 | 2.10E−02 | 2.60E−02 | 6.09E−03 | 1 | 2.386 | CNTN1 |
| 206437_at | NM_003775 | 297 | 3.70E−03 | 1.36E−03 | 3.29E−03 | 1 | 2.397 | EDG6 |
| 207663_x_at | NM_001473 | 298 | 2.10E−02 | 1.14E−02 | 1.79E−03 | 1 | 2.404 | GAGE3 |
| 207739_s_at | NM_001472 | 299 | 2.10E−02 | 1.14E−02 | 1.79E−03 | 1 | 2.404 | GAGE8, |
| | | | | | | | | GAGE4, |
| | | | | | | | | GAGE5, |
| | | | | | | | | GAGE7, |
| | | | | | | | | GAGE2, |
| | | | | | | | | GAGE1, |
| | | | | | | | | GAGE6, |
| | | | | | | | | GAGE3, |
| | | | | | | | | GAGE7B |
| 203889_at | NM_003020 | 300 | 2.10E−02 | 1.14E−02 | 2.16E−03 | 1 | 2.410 | SGNE1 |
| 217210_at | AL031737 | 301 | 2.10E−02 | 1.14E−02 | 2.41E−03 | 1 | 2.431 | — |
| 204844_at | L12468 | 302 | 3.70E−03 | 1.36E−03 | 2.31E−03 | 1 | 2.461 | ENPEP |
| 214726_x_at | AL556041 | 303 | 2.10E−02 | 1.14E−02 | 1.09E−02 | 1 | 2.466 | ADD1 |
| 206702_at | NM_000459 | 304 | 2.10E−02 | 1.14E−02 | 1.23E−03 | 1 | 2.467 | TEK |
| 209835_x_at | BC004372 | 305 | 2.10E−02 | 3.03E−02 | 4.58E−02 | 1 | 2.468 | CD44 |
| 210916_s_at | AF098641 | 306 | 2.10E−02 | 3.03E−02 | 4.58E−02 | 1 | 2.468 | CD44 |
| 212014_x_at | AI493245 | 307 | 2.10E−02 | 3.03E−02 | 4.58E−02 | 1 | 2.468 | CD44 |
| 203594_at | NM_003729 | 308 | 2.10E−02 | 2.60E−02 | 3.38E−02 | 1 | 2.474 | RTCD1 |
| 206537_at | NM_001167 | 309 | 4.11E−04 | 4.11E−04 | 2.90E−04 | 1 | 2.483 | BIRC4 |
| 201196_s_at | M21154 | 310 | 2.10E−02 | 2.60E−02 | 7.72E−03 | 1 | 2.525 | AMD1 |
| 207705_s_at | NM_025176 | 311 | 2.10E−02 | 3.03E−02 | 3.93E−02 | 1 | 2.532 | KIAA0980 |
| 210992_x_at | U90939 | 312 | 2.10E−02 | 3.03E−02 | 4.34E−02 | 1 | 2.544 | FCGR2C |
| 211395_x_at | U90940 | 313 | 2.10E−02 | 3.03E−02 | 4.34E−02 | 1 | 2.544 | FCGR2C |
| 205446_s_at | NM_001880 | 314 | 2.10E−02 | 1.14E−02 | 4.31E−02 | 1 | 2.552 | ATF2 |
| 204979_s_at | NM_007341 | 315 | 2.10E−02 | 7.04E−03 | 2.37E−03 | 1 | 2.587 | SH3BGR |
| 208525_s_at | NM_012369 | 316 | 2.10E−02 | 1.14E−02 | 2.40E−03 | 1 | 2.639 | OR2F1, OR2F2 |
| 208526_at | NM_012369 | 317 | 2.10E−02 | 1.14E−02 | 2.40E−03 | 1 | 2.639 | OR2F1 |
| 204072_s_at | NM_023037 | 318 | 2.10E−02 | 1.14E−02 | 2.67E−02 | 1 | 2.651 | 13CDNA73 |
| 214151_s_at | AU144243 | 319 | 2.10E−02 | 2.60E−02 | 1.49E−02 | 1 | 2.682 | PIGB |
| 221511_x_at | AF212228 | 320 | 2.10E−02 | 2.60E−02 | 1.49E−02 | 1 | 2.682 | CCPG1 |
| 222156_x_at | AK022459 | 321 | 2.10E−02 | 2.60E−02 | 1.49E−02 | 1 | 2.682 | CCPG1 |
| 207360_s_at | NM_002531 | 322 | 2.10E−02 | 7.04E−03 | 2.96E−03 | 1 | 2.733 | NTSR1 |
| 206577_at | NM_003381 | 323 | 2.10E−02 | 3.03E−02 | 4.09E−02 | 1 | 2.750 | VIP |
| 201756_at | NM_002946 | 324 | 2.10E−02 | 2.60E−02 | 8.61E−03 | 1 | 2.779 | RPA2 |
| 220266_s_at | AF105036 | 325 | 2.10E−02 | 1.14E−02 | 1.09E−02 | 1 | 2.807 | KLF4 |
| 211024_s_at | BC006221 | 326 | 3.70E−03 | 1.36E−03 | 5.86E−03 | 1 | 2.869 | TITF1 |
| 206131_at | NM_001832 | 327 | 2.10E−02 | 1.14E−02 | 2.88E−03 | 1 | 2.879 | CLPS |
| 214642_x_at | AI200443 | 328 | 2.10E−02 | 7.04E−03 | 2.99E−03 | 1 | 2.940 | MAGEA5 |
| 200769_s_at | BC001686 | 329 | 4.11E−04 | 4.11E−04 | 6.60E−04 | 1 | 2.942 | MAT2A |
| 213363_at | AW170549 | 330 | 2.10E−02 | 7.04E−03 | 9.28E−04 | 1 | 2.945 | CA5BL |
| 206762_at | NM_002234 | 331 | 2.10E−02 | 2.60E−02 | 1.88E−03 | 1 | 2.952 | KCNA5 |
| 203952_at | NM_007348 | 332 | 2.10E−02 | 7.04E−03 | 4.68E−03 | 1 | 2.967 | ATF6 |
| 201521_s_at | NM_007362 | 333 | 2.10E−02 | 1.14E−02 | 2.09E−03 | 1 | 3.026 | NCBP2 |
| 204227_s_at | NM_004614 | 334 | 2.10E−02 | 2.17E−02 | 4.48E−03 | 1 | 3.055 | TK2 |
| 204643_s_at | NM_006375 | 335 | 4.11E−04 | 4.11E−04 | 2.98E−05 | 1 | 3.068 | COVA1 |
| 204668_at | AL031670 | 336 | 2.10E−02 | 2.60E−02 | 1.94E−02 | 1 | 3.073 | RNF24 |
| 202404_s_at | NM_000089 | 337 | 2.10E−02 | 2.60E−02 | 9.81E−03 | 1 | 3.074 | COL1A2 |
| 210040_at | AF208159 | 338 | 3.70E−03 | 1.36E−03 | 6.35E−03 | 1 | 3.131 | SLC12A5 |
| 215634_at | AF007137 | 339 | 3.70E−03 | 3.70E−03 | 4.86E−04 | 1 | 3.167 | GRIA1 |
| 206091_at | NM_002381 | 340 | 2.10E−02 | 3.03E−02 | 2.69E−03 | 1 | 3.209 | MATN3 |
| 210166_at | AF051151 | 341 | 2.10E−02 | 1.14E−02 | 1.52E−02 | 1 | 3.226 | TLR5 |
| 200713_s_at | NM_012325 | 342 | 2.10E−02 | 3.03E−02 | 2.12E−02 | 1 | 3.241 | MAPRE1 |
| 205732_s_at | NM_006540 | 343 | 3.70E−03 | 3.70E−03 | 6.93E−04 | 1 | 3.257 | NCOA2 |
| 204493_at | NM_001196 | 344 | 2.10E−02 | 2.17E−02 | 8.04E−03 | 1 | 3.263 | BID |
| 207780_at | NM_001340 | 345 | 2.17E−05 | 2.17E−05 | 1.82E−06 | 1 | 3.302 | CYLC2 |
| 217056_at | X61070 | 346 | 2.10E−02 | 3.03E−02 | 1.17E−02 | 1 | 3.434 | TRA@ |
| 209189_at | BC004490 | 347 | 3.70E−03 | 3.70E−03 | 6.05E−03 | 1 | 3.463 | FOS |
| 216392_s_at | AK021846 | 348 | 3.70E−03 | 2.49E−03 | 1.69E−04 | 1 | 3.480 | SEC23IP |
| 215486_at | AW072461 | 349 | 3.70E−03 | 2.49E−03 | 8.93E−03 | 1 | 3.516 | PRPS1L1 |
| 213131_at | R38389 | 350 | 2.10E−02 | 2.17E−02 | 3.62E−03 | 1 | 3.537 | OLFM1 |
| 207681_at | NM_001504 | 351 | 2.10E−02 | 2.17E−02 | 2.78E−02 | 1 | 3.601 | CXCR3 |
| 207224_s_at | NM_016543 | 352 | 2.10E−02 | 7.04E−03 | 3.05E−03 | 1 | 3.879 | SIGLEC7 |
| 207307_at | NM_000868 | 353 | 3.70E−03 | 2.49E−03 | 1.40E−04 | 1 | 4.032 | HTR2C |
| 203676_at | NM_002076 | 354 | 3.70E−03 | 2.49E−03 | 6.66E−04 | 1 | 4.040 | GNS |
| 210729_at | U36269 | 355 | 2.10E−02 | 3.03E−02 | 2.59E−02 | 1 | 4.143 | NPY2R |
| 208743_s_at | BC001359 | 356 | 2.10E−02 | 1.14E−02 | 4.88E−02 | 1 | 4.276 | YWHAB |
| 207643_s_at | NM_001065 | 357 | 2.10E−02 | 1.14E−02 | 5.70E−04 | 1 | 4.356 | TNFRSF1A |
| 205321_at | NM_001415 | 358 | 3.70E−03 | 1.36E−03 | 1.74E−03 | 1 | 4.406 | EIF2S3 |
| 214348_at | NM_001057 | 359 | 3.70E−03 | 1.36E−03 | 1.09E−03 | 1 | 4.453 | TACR2 |
| 206556_at | NM_014410 | 360 | 3.70E−03 | 2.49E−03 | 2.77E−04 | 1 | 4.518 | CLUL1 |
| 216621_at | AL050032 | 361 | 3.70E−03 | 3.70E−03 | 1.12E−03 | 1 | 4.628 | AL050032.1 |
| 203779_s_at | NM_005797 | 362 | 3.70E−03 | 2.49E−03 | 2.04E−03 | 1 | 4.695 | EVA1 |
| 201894_s_at | NM_001920 | 363 | 3.70E−03 | 3.70E−03 | 5.62E−04 | 1 | 4.765 | SSR1 |
| 206826_at | NM_002677 | 364 | 2.10E−02 | 3.03E−02 | 4.05E−02 | 1 | 4.767 | PMP2 |
| 202319_at | NM_015571 | 365 | 4.11E−04 | 2.17E−04 | 1.38E−05 | 1 | 4.842 | SENP6 |
| 210417_s_at | U81802 | 366 | 2.10E−02 | 1.14E−02 | 2.68E−02 | 1 | 4.869 | PIK4CB |
| 208607_s_at | NM_030754 | 367 | 3.70E−03 | 1.36E−03 | 8.25E−04 | 1 | 5.042 | SAA1, SAA2 |
| 214456_x_at | M23699 | 368 | 3.70E−03 | 1.36E−03 | 8.25E−04 | 1 | 5.042 | SAA1 |
| 205126_at | NM_006296 | 369 | 2.10E−02 | 1.14E−02 | 1.06E−02 | 1 | 5.075 | VRK2 |
| 206902_s_at | NM_005728 | 370 | 3.70E−03 | 3.70E−03 | 1.30E−03 | 1 | 5.146 | ENDOGL1 |
| 206903_at | NM_005728 | 371 | 3.70E−03 | 3.70E−03 | 1.30E−03 | 1 | 5.146 | ENDOGL2 |
| 210224_at | AF031469 | 372 | 3.70E−03 | 3.70E−03 | 4.32E−03 | 1 | 5.155 | MR1 |
| 205408_at | NM_004641 | 373 | 2.10E−02 | 7.04E−03 | 5.13E−04 | 1 | 5.249 | MLLT10 |
| 215157_x_at | AI734929 | 374 | 3.70E−03 | 1.36E−03 | 2.13E−03 | 1 | 5.277 | PABPC1 |
| 210996_s_at | U43430 | 375 | 4.11E−04 | 2.17E−04 | 7.55E−04 | 1 | 5.403 | YWHAE |
| 207236_at | NM_003419 | 376 | 2.10E−02 | 7.04E−03 | 3.06E−03 | 1 | 5.517 | ZNF345 |
| 212850_s_at | AA584297 | 377 | 2.10E−02 | 2.60E−02 | 8.55E−03 | 1 | 5.626 | LRP4 |
| 209581_at | BC001387 | 378 | 4.11E−04 | 2.17E−04 | 7.63E−04 | 1 | 5.674 | HRASLS3 |
| 203066_at | NM_014863 | 379 | 2.10E−02 | 1.14E−02 | 4.28E−03 | 1 | 5.675 | GALNAC4S- |
| | | | | | | | | 6ST |
| 200641_s_at | BC003623 | 380 | 2.10E−02 | 3.03E−02 | 4.18E−03 | 1 | 5.731 | YWHAZ |
| 205538_at | NM_003389 | 381 | 2.10E−02 | 2.60E−02 | 4.30E−02 | 1 | 5.793 | CORO2A |
| 204886_at | AL043646 | 382 | 2.10E−02 | 1.14E−02 | 1.17E−03 | 1 | 5.855 | PLK4 |
| 206439_at | NM_004950 | 383 | 2.10E−02 | 2.17E−02 | 4.94E−03 | 1 | 6.348 | DSPG3 |
| 212617_at | AB002293 | 384 | 2.10E−02 | 2.60E−02 | 2.60E−03 | 1 | 6.788 | ZNF609 |
| 212461_at | BF793951 | 385 | 2.10E−02 | 3.03E−02 | 3.54E−02 | 1 | 6.845 | — |
| 214602_at | D17391 | 386 | 2.10E−02 | 1.14E−02 | 3.49E−03 | 1 | 7.218 | COL4A4 |
| 206812_at | NM_000025 | 387 | 3.70E−03 | 2.49E−03 | 6.95E−03 | 1 | 7.330 | ADRB3 |
| 202620_s_at | NM_000935 | 388 | 3.70E−03 | 3.70E−03 | 8.23E−03 | 1 | 7.350 | PLOD2 |
| 206925_at | NM_005668 | 389 | 2.10E−02 | 2.60E−02 | 7.44E−03 | 1 | 7.681 | SIAT8D |
| 205530_at | NM_004453 | 390 | 2.10E−02 | 3.03E−02 | 3.39E−02 | 1 | 7.717 | ETFDH |
| 203834_s_at | NM_006464 | 391 | 3.70E−03 | 1.36E−03 | 7.54E−04 | 1 | 7.727 | TGOLN2 |
| 202923_s_at | NM_001498 | 392 | 2.10E−02 | 7.04E−03 | 1.04E−03 | 1 | 7.744 | GCLC |
| 203517_at | NM_006554 | 393 | 2.10E−02 | 3.03E−02 | 3.91E−03 | 1 | 8.001 | MTX2 |
| 209754_s_at | AF113682 | 394 | 3.70E−03 | 3.70E−03 | 1.91E−03 | 1 | 8.351 | TMPO |
| 207245_at | NM_001077 | 395 | 3.70E−03 | 2.49E−03 | 4.63E−03 | 1 | 8.575 | UGT2B17 |
| 207392_x_at | NM_001076 | 396 | 3.70E−03 | 2.49E−03 | 4.63E−03 | 1 | 8.575 | UGT2B15 |
| 206692_at | NM_002241 | 397 | 2.10E−02 | 7.04E−03 | 3.37E−03 | 1 | 8.819 | KCNJ10 |
| 208050_s_at | NM_001224 | 398 | 4.11E−04 | 2.17E−04 | 2.66E−05 | 1 | 9.015 | CASP2 |
| 210055_at | BE045816 | 399 | 2.10E−02 | 2.60E−02 | 3.07E−03 | 1 | 9.077 | TSHR |
| 205174_s_at | NM_012413 | 400 | 2.10E−02 | 7.04E−03 | 3.72E−03 | 1 | 10.221 | QPCT |
| 210375_at | X83858 | 401 | 3.70E−03 | 2.49E−03 | 8.20E−03 | 1 | 10.333 | PTGER3 |
| 206099_at | NM_006255 | 402 | 2.10E−02 | 1.14E−02 | 1.38E−02 | 1 | 10.583 | PRKCH |
| 203550_s_at | NM_006589 | 403 | 2.10E−02 | 1.14E−02 | 7.88E−04 | 1 | 10.893 | C1orf2 |
| 210331_at | AB048365 | 404 | 2.10E−02 | 3.03E−02 | 1.00E−02 | 1 | 10.931 | NEDL1 |
| 205206_at | NM_000216 | 405 | 3.70E−03 | 1.36E−03 | 1.76E−04 | 1 | 10.990 | KAL1 |
| 215993_at | AF070543 | 406 | 2.10E−02 | 1.14E−02 | 8.81E−03 | 1 | 12.226 | ODZ2 |
| 213090_s_at | AI744029 | 407 | 2.10E−02 | 2.60E−02 | 1.93E−02 | 1 | 12.921 | TAF4 |
| 202430_s_at | NM_021105 | 408 | 2.10E−02 | 2.60E−02 | 6.43E−03 | 1 | 13.006 | PLSCR1 |
| 215996_at | AI446234 | 409 | 3.70E−03 | 2.49E−03 | 2.92E−04 | 1 | 13.631 | pre-TNK |
| 204073_s_at | NM_013279 | 410 | 2.10E−02 | 3.03E−02 | 3.88E−02 | 1 | 14.189 | C11orf9 |
| 215599_at | X83300 | 411 | 2.10E−02 | 3.03E−02 | 1.34E−02 | 1 | 15.668 | SMA4 |
| 207725_at | NM_004575 | 412 | 2.10E−02 | 1.14E−02 | 1.37E−02 | 1 | 16.065 | POU4F2 |
| 212720_at | AI670847 | 413 | 3.70E−03 | 2.49E−03 | 5.17E−04 | 1 | 16.903 | PAPOLA |
| 209459_s_at | AF237813 | 414 | 2.10E−02 | 2.60E−02 | 3.44E−03 | 1 | 17.443 | ABAT |
| 209460_at | AF237813 | 415 | 2.10E−02 | 2.60E−02 | 3.44E−03 | 1 | 17.443 | ABAT |
| 203626_s_at | NM_005983 | 416 | 2.10E−02 | 1.14E−02 | 1.27E−03 | 1 | 17.743 | SKP2 |
| 210567_s_at | BC001441 | 417 | 2.10E−02 | 1.14E−02 | 1.27E−03 | 1 | 17.743 | SKP2 |
| 216984_x_at | D84143 | 418 | 3.70E−03 | 1.36E−03 | 6.07E−03 | 1 | 19.947 | IGLVJ |
| 201817_at | NM_014671 | 419 | 2.10E−02 | 2.17E−02 | 1.70E−03 | 1 | 21.762 | UBE3C |
| 213371_at | AI803302 | 420 | 2.10E−02 | 2.17E−02 | 1.20E−03 | 1 | 28.386 | LDB3 |
| 216887_s_at | AJ133768 | 421 | 2.10E−02 | 2.17E−02 | 1.20E−03 | 1 | 28.386 | LDB3 |
| 204003_s_at | NM_007342 | 422 | 2.10E−02 | 2.17E−02 | 7.68E−04 | 1 | 34.471 | NUPL2 |
| 216430_x_at | AF043586 | 423 | 2.10E−02 | 7.04E−03 | 1.18E−03 | 1 | 37.955 | IGLJ3 |
| 216908_x_at | AF001549 | 424 | 4.11E−04 | 4.11E−04 | 5.94E−04 | 1 | 39.235 | LOC94431 |
| 215719_x_at | X83493 | 425 | 2.10E−02 | 7.04E−03 | 2.33E−03 | 1 | 42.507 | TNFRSF6 |
| 203279_at | NM_014674 | 426 | 2.10E−02 | 2.60E−02 | 2.19E−03 | 1 | 48.486 | EDEM1 |
| 201798_s_at | NM_013451 | 427 | 3.70E−03 | 2.49E−03 | 2.54E−03 | 1 | 131.626 | FER1L3 |
| 208363_s_at | NM_001566 | 428 | 2.10E−02 | 1.14E−02 | 1.99E−02 | 1 | 208.057 | INPP4A |
| 208364_at | NM_001566 | 429 | 2.10E−02 | 1.14E−02 | 1.99E−02 | 1 | 208.057 | INPP4A |
| 206225_at | NM_014910 | 430 | 3.70E−03 | 2.49E−03 | 1.55E−03 | 1 | 326.316 | ZNF507 |
| 211749_s_at | BC005941 | 431 | 2.10E−02 | 2.17E−02 | 1.41E−03 | 1 | NA | VAMP3 |

Table 2: Genetic markers which are differentially expressed between multiple sclerosis patients having good or poor clinical outcome are provided (the Probeset ID of the Affymetrix Gene Chip), along with the corresponding GenBank accession number (GenBank Acc. No.), the gene symbol, the SEQ ID NO., the p values using the TNOM, Info and t-Test statistical tests, the direction of change in gene expression (“1” - upregulation; “−1” - downregulation) and the fold change (F/C) in MS patients having poor clinical outcome as compared to good clinical outcome (Poor/Good).
NA—not available.

[0136] Altogether, these results demonstrate the MS clinical outcome prediction ability of the identified 431 genes which are differentially expressed between RRMS patients with good or poor clinical outcome.

### Example 2

### Identification of RRMS Clinical Outcome Predicting Genes

[0137] Experimental and Statistical Results

[0138] Predictive clinical outcome gene expression signature—As is shown in FIG. 6, application of the SVM on data from 19/26 patients with good (9 patients) or poor (10 patients) outcome as a training set, and 9/27 additional patients from the validation group as test set, resulted in a high classification rate of 89%. This high classification was achieved by the Forward feature selection algorithm using 34 gene transcripts (29 genes) (Table 3, hereinbelow) accordingly defined as predictive. Classification rate was 70.4% using only one gene (RRN3) and reached a rate of 85.2% using 6 genes (RRN3, KLF4, HAB1, TPSB2, IGLJ3, COL11A2). Addition of one or all of the remaining predictive genes resulted in maximal classification rate of 89.0%. This suggests that a predictive ability with an accuracy of 89% could be achieved using only 7 genes.

TABLE 3
Genes capable of predicting the clinical outcome of RRMS

| | Corresponding | SEQ | | | | | F/C | |
|---|---|---|---|---|---|---|---|---|
| | GenBank Acc. | ID | TNOM | Info | t-Test | | (Poor/ | Gene |
| Probeset ID | No. | NO: | PValue | PValue | PValue | Dir | Good) | Symbol |
| 203683_s_at | NM_003377 | 156 | 2.10E−02 | 3.03E−02 | 4.63E−03 | −1 | 7.31 | VEGFB |
| 206148_at | NM_002183 | 143 | 2.10E−02 | 3.03E−02 | 2.62E−02 | −1 | 5.17 | IL3RA |
| 207134_x_at | NM_024164 | 127 | 2.10E−02 | 2.17E−02 | 8.61E−03 | −1 | 4.29 | TPSB2 |
| 207532_at | NM_006891 | 46 | 3.70E−03 | 3.70E−03 | 2.66E−02 | −1 | 2.06 | CRYGD |
| 207705_s_at | NM_025176 | 311 | 2.10E−02 | 3.03E−02 | 3.93E−02 | 1 | 2.53 | KIAA0980 |
| 207900_at | NM_002987 | 140 | 2.10E−02 | 1.14E−02 | 6.92E−03 | −1 | 5.13 | CCL17 |
| 208687_x_at | AF352832 | 74 | 3.70E−03 | 3.70E−03 | 3.18E−02 | −1 | 2.47 | HSPA8 |
| 209188_x_at | AW516932 | 276 | 3.70E−03 | 1.36E−03 | 3.30E−03 | 1 | 2.07 | DR1 |
| 209466_x_at | M57399 | 180 | 2.10E−02 | 7.04E−03 | 6.13E−03 | −1 | 21.34 | PTN |
| 209686_at | BC001766 | 182 | 2.10E−02 | 3.03E−02 | 8.52E−03 | −1 | 22.43 | S100B |
| 209726_at | AB018195 | 191 | 3.70E−03 | 1.36E−03 | 1.03E−02 | −1 | 74.85 | CA11 |
| 210328_at | AF101477 | 61 | 2.10E−02 | 2.60E−02 | 3.52E−02 | −1 | 2.26 | GNMT |
| 210916_s_at | AF098641 | 306 | 2.10E−02 | 3.03E−02 | 4.58E−02 | 1 | 2.47 | CD44 |
| 213815_x_at | AI913329 | 115 | 2.10E−02 | 2.60E−02 | 3.04E−03 | −1 | 3.82 | NY-REN24 |
| 214613_at | AW024085 | 97 | 2.10E−02 | 7.04E−03 | 1.72E−02 | −1 | 3.02 | GPR3 |
| 214726_x_at | AL556041 | 303 | 2.10E−02 | 1.14E−02 | 1.09E−02 | 1 | 2.47 | ADD1 |
| 215116_s_at | AF035321 | 272 | 2.10E−02 | 7.04E−03 | 3.89E−02 | 1 | 2.02 | DNM1 |
| 215766_at | AL096729 | 50 | 2.10E−02 | 7.04E−03 | 2.58E−03 | −1 | 2.12 | GSTA1 |
| 215778_x_at | AJ006206 | 16 | 2.10E−02 | 2.60E−02 | 2.29E−02 | −1 | 1.59 | HAB1 |
| 215781_s_at | D87012 | 63 | 2.10E−02 | 2.60E−02 | 2.98E−02 | −1 | 2.27 | TOP3B |
| 215954_s_at | AI200896 | 117 | 2.10E−02 | 2.60E−02 | 3.04E−03 | −1 | 3.82 | NY-REN24 |
| 215993_at | AF070543 | 406 | 2.10E−02 | 1.14E−02 | 8.81E−03 | 1 | 12.23 | ODZ2 |
| 216430_x_at | AF043586 | 423 | 2.10E−02 | 7.04E−03 | 1.18E−03 | 1 | 37.95 | IGLJ3 |
| 216474_x_at | AF206667 | 128 | 2.10E−02 | 2.17E−02 | 8.61E−03 | −1 | 4.29 | TPSAB1, |
| | | | | | | | | TPSB2 |
| 216652_s_at | AL137673 | 277 | 3.70E−03 | 1.36E−03 | 3.30E−03 | 1 | 2.07 | DR1 |
| 216699_s_at | L10038 | 47 | 2.10E−02 | 7.04E−03 | 5.23E−03 | −1 | 2.07 | KLK1 |
| 216875_x_at | X83412 | 17 | 2.10E−02 | 2.60E−02 | 2.29E−02 | −1 | 1.59 | HAB1 |
| 216908_x_at | AF001549 | 424 | 4.11E−04 | 4.11E−04 | 5.94E−04 | 1 | 39.23 | RRN3 |
| 216984_x_at | D84143 | 418 | 3.70E−03 | 1.36E−03 | 6.07E−03 | 1 | 19.95 | IGLVJ |
| 216993_s_at | U32169 | 190 | 2.10E−02 | 2.60E−02 | 1.55E−02 | −1 | 65.43 | COL11A2 |
| 217060_at | U03115 | 139 | 2.10E−02 | 3.03E−02 | 4.35E−02 | −1 | 5.11 | TCRBV |
| 217109_at | AJ242547 | 102 | 3.70E−03 | 3.70E−03 | 2.34E−02 | −1 | 3.21 | MUC4 |
| 217110_s_at | AJ242547 | 103 | 3.70E−03 | 3.70E−03 | 2.34E−02 | −1 | 3.21 | MUC4 |
| 220266_s_at | AF105036 | 325 | 2.10E−02 | 1.14E−02 | 1.09E−02 | 1 | 2.81 | KLF4 |

[0139] Independent validation of the predictive clinical outcome gene expression signature—Applying the resulting SVM generated classifier, based on the 34 predictive genes to an additional data set of 18/27 patients from the validation group maintained the high classification rate of 88.9%, p<0.00001.

[0140] Altogether, these results demonstrate the identification of 34 genes which are capable of predicting the outcome of RRMS (e.g., poor or good clinical outcome) with a classification rate of about 90%.

[0141] In addition, these results demonstrate that gene expression profiling combined with carefully chosen learning algorithms allow the prediction of disease outcome and can be incorporated into clinical decision making in relapsing-remitting MS. Since MS has a winding course and the rate of disease progression differs between patients, the results obtained from the present study can predict patient outcome and may be incorporated in individualized tailored management of RRMS. Application of the invention may enable planning of tailored therapeutic strategies and allow delineation of patients at high-risk that may benefit from early therapy.

### Example 3

### Biological Regulation of the Predictive Clinical Outcome Gene Expression

[0142] Functional Annotation Results

[0143] Functional annotation of the 34 predictive genes described in Table 3, Example 2, hereinabove, demonstrated that this group of genes was significantly enriched with zinc-ion binding protein genes (S100B, KLF4, CA11) and with genes exhibiting cytokine activity (CCL17, MUC4, PTN VEGFB), p=0.02 and p=0.005, respectively (FIG. 7). The Genomica software confirmed the enrichment by zinc-ion binding gene family and by cytokine activity genes using all the 431 differentiating gene expression signature data (FIGS. 8a-c). Using these enriched gene-families, regulatory pathways were reconstructed (FIGS. 9 and 10). These pathways suggest that apoptosis regulation through zinc-ion binding and cytokine activity is responsible for Th1/Th2 cytokine activity shift and may play a role in the clinical outcome of RRMS. Genomica reconstruction of regulatory gene expression networks based on all 431 differentiating genes resulted in a regulation pathway in which the predictive zinc-ion binding gene KLF4 in association with CLPP and RRLP mediate downstream genes including S100B (FIG. 10). Other interesting functional groups in the 29 predictive genes include adhesion and cell migration like CD44 and COL11A2, and T cell receptor genes like TCRVB, all play an important role in MS pathogenesis.

### Example 4

### Selection of Differentiating Genes

[0144] Computational Results

[0145] Selection of differentiating genes and determination of their predictive power—To evaluate the power of each of the 431 differentiating genes identified in this study to predict the prognosis (good or poor clinical outcome) of a subject diagnosed with multiple sclerosis, the study sample was randomly divided into 80% of the subjects as a “training set” and 20% of the subjects as a “test set” and a model was build using the SVM based on RBF kernel. For each of the differentiating genes the predictability of the training set on the clinical outcome of the test set was computed and the average error following 50 permutations was calculated. Genes with the lowest average error were selected, then, for each selected gene, the remaining genes were added one after the other, by selecting the next gene such that the average error after 50 repeats of the group of genes including the new gene has the lowest average error as compared to the addition of another gene. This process was repeated 430 times for each additional genes added to the previous group of genes. The resulting average error plot is shown in FIG. 12, and the average error for each gene combination is demonstrated in Table 4, hereinbelow, wherein the first gene in row number 1 (SEQ ID NO:158; NM_{—}005012) exhibits the best predictive power (error average of “0”).

TABLE 4
Average error of gene combination with predictive
ability of Multiple Sclerosis clinical outcome

| | SEQ | | | Aver- | |
|---|---|---|---|---|---|
| Row | ID | | Gene Bank | age | |
| Number | NO: | Probeset ID | ID | error | Gene Symbol |
| 1 | 158 | 205805_s_at | NM_005012 | 0 | ROR1 |
| 2 | 68 | 200949_x_at | NM_001023 | 0 | RPS20 |
| 3 | 5 | 201783_s_at | NM_021975 | 0 | RELA |
| 4 | 58 | 200647_x_at | NM_003752 | 0 | EIF3S8 |
| 5 | 329 | 200769_s_at | NM_005911 | 0 | MAT2A |
| 6 | 120 | 200936_at | NM_000973 | 0 | RPL8 |
| 7 | 380 | 200641_s_at | U28964 | 0 | YWHAZ |
| 8 | 342 | 200713_s_at | NM_012325 | 0 | MAPRE1 |
| 9 | 88 | 200790_at | NM_002539 | 0 | ODC1 |
| 10 | 166 | 200834_s_at | NM_001024 | 0 | RPS21 |
| 11 | 266 | 200889_s_at | AI016620 | 0 | SSR1 |
| 12 | 51 | 201023_at | NM_005642 | 0 | TAF7 |
| 13 | 310 | 201196_s_at | M21154 | 0 | AMD1 |
| 14 | 91 | 201513_at | AI659180 | 0 | TSN |
| 15 | 427 | 201798_s_at | NM_013451 | 0 | FER1L3 |
| 16 | 22 | 201889_at | NM_014888 | 0 | FAM3C |
| 17 | 84 | 201418_s_at | NM_003107 | 0 | SOX4 |
| 18 | 269 | 200771_at | NM_002293 | 0 | LAMC1 |
| 19 | 388 | 202620_s_at | NM_000935 | 0 | PLOD2 |
| 20 | 155 | 201497_x_at | NM_022844 | 0 | MYH11 |
| 21 | 333 | 201521_s_at | NM_007362 | 0 | NCBP2 |
| 22 | 215 | 201538_s_at | NM_004090 | 0 | DUSP3 |
| 23 | 195 | 202270_at | NM_002053 | 0 | GBP1 |
| 24 | 419 | 201817_at | NM_014671 | 0 | KIAA0010/ |
| | | | | | UBE3C |
| 25 | 75 | 202314_at | NM_000786 | 0 | CYP51A1 |
| 26 | 125 | 204197_s_at | NM_004350 | 0 | RUNX3 |
| 27 | 11 | 203205_at | NM_014663 | 0 | JMJD2 |
| 28 | 251 | 201453_x_at | NM_005614 | 0 | RHEB |
| 29 | 253 | 202805_s_at | NM_004996 | 0 | ABCC1 |
| 30 | 337 | 202404_s_at | NM_000089 | 0 | COL1A2 |
| 31 | 110 | 202140_s_at | NM_003992 | 0 | CLK3 |
| 32 | 222 | 203266_s_at | NM_003010 | 0 | MAP2K4 |
| 33 | 56 | 202799_at | NM_006012 | 0 | CLPP |
| 34 | 324 | 201756_at | NM_002946 | 0 | RPA2 |
| 35 | 156 | 203683_s_at | NM_003377 | 0 | VEGFB |
| 36 | 7 | 203145_at | NM_006461 | 0 | SPAG5 |
| 37 | 57 | 202127_at | AB011108 | 0 | PRPF4B |
| 38 | 233 | 202260_s_at | NM_003165 | 0 | STXBP1 |
| 39 | 149 | 202268_s_at | NM_003905 | 0 | APPBP1 |
| 40 | 363 | 201894_s_at | NM_001920 | 0 | DCN |
| 41 | 107 | 203422_at | NM_002691 | 0 | POLD1 |
| 42 | 193 | 203503_s_at | NM_004565 | 0 | PEX14 |
| 43 | 393 | 203517_at | NM_006554 | 0 | MTX2 |
| 44 | 265 | 202886_s_at | M65254 | 0 | PPP2R1B |
| 45 | 160 | 203329_at | NM_002845 | 0 | PTPRM |
| 46 | 41 | 202732_at | NM_007066 | 0 | PKIG |
| 47 | 38 | 203022_at | NM_006397 | 0 | RNASEH2A |
| 48 | 90 | 203340_s_at | NM_003705 | 0 | SLC25A12 |
| 49 | 70 | 203701_s_at | NM_017722 | 0 | FLJ20244 |
| 50 | 85 | 202410_x_at | NM_000612 | 0 | IGF2 |
| 51 | 403 | 203550_s_at | NM_006589 | 0 | C1orf2 |
| 52 | 304 | 206702_at | NM_000459 | 0 | TEK |
| 53 | 426 | 203279_at | NM_014674 | 0 | EDEM1 |
| 54 | 240 | 205261_at | NM_002630 | 0 | PGC |
| 55 | 49 | 203193_at | NM_004451 | 0 | ESRRA |
| 56 | 294 | 205429_s_at | NM_016447 | 0 | MPP6 |
| 57 | 136 | 202415_s_at | NM_012267 | 0 | HSPBP1 |
| 58 | 150 | 202909_at | NM_014805 | 0 | EPM2AIP1 |
| 59 | 232 | 205990_s_at | NM_003392 | 0 | WNT5A |
| 60 | 10 | 203426_s_at | M65062 | 0 | IGFBP5 |
| 61 | 392 | 202923_s_at | NM_001498 | 0 | GCLC |
| 62 | 89 | 203339_at | AI887457 | 0 | SLC25A12 |
| 63 | 332 | 203952_at | NM_007348 | 0 | ATF6 |
| 64 | 290 | 203806_s_at | NM_000135 | 0 | FANCA |
| 65 | 422 | 204003_s_at | NM_007342 | 0 | NUPL2 |
| 66 | 291 | 203440_at | M34064 | 0 | CDH2 |
| 67 | 114 | 202554_s_at | AL527430 | 0 | GSTM3 |
| 68 | 309 | 206537_at | NM_001167 | 0 | BIRC4 |
| 69 | 203 | 206421_s_at | NM_003784 | 0 | SERPINB7 |
| 70 | 362 | 203779_s_at | NM_005797 | 0 | EVA1 |
| 71 | 397 | 206692_at | NM_002241 | 0 | KCNJ10 |
| 72 | 334 | 204227_s_at | NM_004614 | 0 | TK2 |
| 73 | 302 | 204844_at | L12468 | 0 | ENPEP |
| 74 | 179 | 203851_at | NM_002178 | 0 | IGFBP6 |
| 75 | 171 | 208733_at | AW301641 | 0 | RAB2 |
| 76 | 53 | 204319_s_at | NM_002925 | 0 | RGS10 |
| 77 | 402 | 206099_at | NM_006255 | 0 | PRKCH |
| 78 | 315 | 204979_s_at | NM_007341 | 0 | SH3BGR |
| 79 | 271 | 206609_at | NM_005462 | 0 | MAGEC1 |
| 80 | 218 | 205062_x_at | NM_002892 | 0 | RBBP1 |
| 81 | 154 | 202312_s_at | NM_000088 | 0 | COL1A1 |
| 82 | 243 | 207010_at | NM_000812 | 0 | GABRB1 |
| 83 | 211 | 203501_at | NM_006102 | 0 | PGCP |
| 84 | 180 | 209466_x_at | M57399 | 0 | PTN |
| 85 | 412 | 207725_at | NM_004575 | 0 | POU4F2 |
| 86 | 300 | 203889_at | NM_003020 | 0 | SGNE1 |
| 87 | 131 | 212674_s_at | AK002076 | 0 | DHX30 |
| 88 | 71 | 210463_x_at | BC002492 | 0 | FLJ20244 |
| 89 | 398 | 208050_s_at | NM_001224 | 0 | CASP2 |
| 90 | 289 | 215017_s_at | AW270932 | 0 | FLJ20275 |
| 91 | 371 | 206903_at | NM_005728 | 0 | ENDOGL1 |
| 92 | 118 | 204144_s_at | NM_004204 | 0 | PIGQ |
| 93 | 220 | 212976_at | R41498 | 0 | TA-LRRP |
| 94 | 82 | 203801_at | AA013164 | 0 | SIP |
| 95 | 42 | 205013_s_at | NM_000675 | 0 | ADORA2A |
| 96 | 430 | 206225_at | NM_014910 | 0 | KIAA1084 |
| 97 | 64 | 204163_at | NM_007046 | 0 | EMILIN1 |
| 98 | 144 | 204816_s_at | NM_014681 | 0 | DHX34 |
| 99 | 2 | 205034_at | NM_004702 | 0 | CCNE2 |
| 100 | 205 | 204202_at | NM_017604 | 0 | KIAA1023 |
| 101 | 405 | 205206_at | NM_000216 | 0 | KAL1 |
| 102 | 318 | 204072_s_at | NM_023037 | 0 | 13CDNA73 |
| 103 | 146 | 206398_s_at | NM_001770 | 0 | CD19 |
| 104 | 314 | 205446_s_at | NM_001880 | 0 | ATF2 |
| 105 | 12 | 203324_s_at | NM_001233 | 0 | CAV2 |
| 106 | 416 | 203626_s_at | NM_005983 | 0 | SKP2 |
| 107 | 267 | 206942_s_at | NM_002674 | 0 | PMCH |
| 108 | 105 | 206759_at | NM_002002 | 0.005 | FCER2 |
| 109 | 353 | 207307_at | NM_000868 | 0 | HTR2C |
| 110 | 296 | 211203_s_at | U07820 | 0 | CNTN1 |
| 111 | 224 | 207037_at | NM_003839 | 0.005 | TNFRSF11A |
| 112 | 165 | 206516_at | NM_000479 | 0 | AMH |
| 113 | 113 | 208041_at | NM_002929 | 0 | RHOK |
| 114 | 345 | 207780_at | NM_001340 | 0 | CYLC2 |
| 115 | 387 | 206812_at | NM_000025 | 0.005 | ADRB3 |
| 116 | 61 | 210328_at | AF101477 | 0 | GNMT |
| 117 | 250 | 214099_s_at | AK001619 | 0.005 | PDE4DIP |
| 118 | 59 | 210949_s_at | BC000533 | 0.005 | EIF3S8 |
| 119 | 235 | 211561_x_at | L35253 | 0.005 | MAPK14 |
| 120 | 382 | 204886_at | AL043646 | 0.005 | STK18 |
| 121 | 143 | 206148_at | NM_002183 | 0.005 | IL3RA |
| 122 | 361 | 216621_at | AL050032 | 0 | — |
| 123 | 372 | 210224_at | AF031469 | 0.005 | MR1 |
| 124 | 199 | 209413_at | BC002431 | 0 | B4GALT2 |
| 125 | 79 | 206879_s_at | NM_013982 | 0 | NRG2 |
| 126 | 116 | 214892_x_at | BC004262 | 0 | NY-REN-24 |
| 127 | 162 | 208580_x_at | NM_021968 | 0.005 | HIST1H4J |
| 128 | 322 | 207360_s_at | NM_002531 | 0.005 | NTSR1 |
| 129 | 354 | 203676_at | NM_002076 | 0 | GNS |
| 130 | 391 | 203834_s_at | NM_006464 | 0.01 | TGOLN2 |
| 131 | 377 | 212850_s_at | AA584297 | 0.005 | LRP4 |
| 132 | 255 | 205619_s_at | NM_004527 | 0.005 | MEOX1 |
| 133 | 270 | 206145_at | NM_000324 | 0.005 | RHAG |
| 134 | 373 | 205408_at | NM_004641 | 0.01 | MLLT10 |
| 135 | 104 | 212852_s_at | AL538601 | 0.005 | SSA2 |
| 136 | 400 | 205174_s_at | NM_012413 | 0.01 | QPCT |
| 137 | 67 | 222206_s_at | AA781143 | 0.005 | LOC56926 |
| 138 | 167 | 208105_at | NM_000164 | 0.005 | GIPR |
| 139 | 423 | 216430_x_at | AF043586 | 0.005 | IGLJ3 |
| 140 | 188 | 208227_x_at | NM_021721 | 0.01 | ADAM22 |
| 141 | 182 | 209686_at | BC001766 | 0.005 | S100B |
| 142 | 106 | 206760_s_at | NM_002002 | 0.015 | FCER2 |
| 143 | 54 | 209477_at | BC000738 | 0.015 | EMD |
| 144 | 326 | 211024_s_at | BC006221 | 0.005 | TITF1 |
| 145 | 164 | 208091_s_at | NM_030796 | 0.01 | DKFZP564K0822 |
| 146 | 307 | 212014_x_at | AI493245 | 0 | CD44 |
| 147 | 383 | 206439_at | NM_004950 | 0.01 | DSPG3 |
| 148 | 260 | 205962_at | NM_002577 | 0.005 | PAK2 |
| 149 | 340 | 206091_at | NM_002381 | 0.01 | MATN3 |
| 150 | 357 | 207643_s_at | NM_001065 | 0.005 | TNFRSF1A |
| 151 | 390 | 205530_at | NM_004453 | 0.01 | ETFDH |
| 152 | 161 | 207036_x_at | NM_000836 | 0.005 | GRIN2D |
| 153 | 6 | 213457_at | BF739959 | 0.005 | MFHAS1 |
| 154 | 316 | 208525_s_at | NM_012369 | 0.005 | OR2F1 |
| 155 | 272 | 215116_s_at | AF035321 | 0.01 | DNM1 |
| 156 | 338 | 210040_at | AF208159 | 0.01 | SLC12A5 |
| 157 | 241 | 207406_at | NM_000780 | 0 | CYP7A1 |
| 158 | 367 | 208607_s_at | NM_030754 | 0.005 | SAA2 |
| 159 | 379 | 203066_at | NM_014863 | 0.01 | GALNAC4S-6ST |
| 160 | 40 | 212242_at | AL565074 | 0.005 | TUBA1 |
| 161 | 381 | 205538_at | NM_003389 | 0.015 | CORO2A |
| 162 | 231 | 205312_at | NM_003120 | 0.01 | SPI1 |
| 163 | 39 | 203071_at | NM_004636 | 0.015 | SEMA3B |
| 164 | 256 | 215130_s_at | AC002550 | 0.02 | MGC35048 |
| 165 | 286 | 212942_s_at | AB033025 | 0.02 | KIAA1199 |
| 166 | 8 | 210822_at | U72513 | 0.015 | na |
| 167 | 151 | 205798_at | NM_002185 | 0.005 | IL7R |
| 168 | 399 | 210055_at | BE045816 | 0.01 | TSHR |
| 169 | 33 | 205272_s_at | NM_006250 | 0.02 | PRH1 |
| 170 | 254 | 215008_at | AA582404 | 0.01 | TLL2 |
| 171 | 295 | 208340_at | NM_003723 | 0.025 | — |
| 172 | 141 | 205189_s_at | NM_000136 | 0.02 | FANCC |
| 173 | 429 | 208364_at | NM_001566 | 0.02 | INPP4A |
| 174 | 65 | 207954_at | NM_002050 | 0.015 | GATA2 |
| 175 | 229 | 205141_at | NM_001145 | 0.03 | RNASE4 |
| 176 | 259 | 216052_x_at | AF115765 | 0.025 | ARTN |
| 177 | 355 | 210729_at | U32500 | 0.02 | NPY2R |
| 178 | 298 | 207663_x_at | NM_001473 | 0.02 | GAGE4 |
| 179 | 173 | 214481_at | NM_003514 | 0.02 | HIST1H2AM |
| 180 | 371 | 206903_at | NM_005728 | 0.025 | ENDOGL1 |
| 181 | 86 | 204400_at | NM_005864 | 0.015 | EFS |
| 182 | 45 | 208059_at | NM_005201 | 0.02 | CCR8 |
| 183 | 305 | 209835_x_at | BC004372 | 0.03 | CD44 |
| 184 | 127 | 207134_x_at | NM_024164 | 0.025 | TPSB2 |
| 185 | 133 | 210619_s_at | AF173154 | 0.03 | HYAL1 |
| 186 | 200 | 214507_s_at | NM_014285 | 0.025 | RRP4 |
| 187 | 313 | 211395_x_at | U90940 | 0.015 | FCGR2B |
| 188 | 370 | 206902_s_at | NM_005728 | 0.025 | ENDOGL1 |
| 189 | 112 | 210249_s_at | U59302 | 0.025 | NCOA1 |
| 190 | 226 | 208359_s_at | NM_004981 | 0.03 | KCNJ4 |
| 191 | 249 | 209260_at | BC000329 | 0.025 | SFN |
| 192 | 80 | 205463_s_at | NM_002607 | 0.025 | PDGFA |
| 193 | 299 | 207739_s_at | NM_001472 | 0.025 | GAGE1 |
| 194 | 196 | 201975_at | NM_002956 | 0.025 | RSN |
| 195 | 27 | 209031_at | AL519710 | 0.025 | IGSF4 |
| 196 | 308 | 203594_at | NM_003729 | 0.03 | RTCD1 |
| 197 | 288 | 207325_x_at | NM_004988 | 0.025 | MAGEA1 |
| 198 | 349 | 215486_at | AW072461 | 0.03 | LOC221823 |
| 199 | 108 | 202766_s_at | NM_000138 | 0.04 | FBN1 |
| 200 | 311 | 207705_s_at | NM_025176 | 0.035 | KIAA0980 |
| 201 | 14 | 217165_x_at | M10943 | 0.04 | MT1F |
| 202 | 130 | 214488_at | NM_002886 | 0.035 | RAP2B |
| 203 | 285 | 216866_s_at | M64108 | 0.035 | COL14A1 |
| 204 | 207 | 215906_at | S65921 | 0.045 | — |
| 205 | 365 | 202319_at | NM_015571 | 0.035 | SUSP1 |
| 206 | 275 | 207654_x_at | NM_001938 | 0.025 | DR1 |
| 207 | 284 | 216865_at | M64108 | 0.03 | COL14A1 |
| 208 | 96 | 212999_x_at | AW276186 | 0.04 | HLA-DQB1 |
| 209 | 172 | 221847_at | BF665706 | 0.035 | — |
| 210 | 76 | 214095_at | AW190316 | 0.03 | LOC56901 |
| 211 | 279 | 214566_at | NM_012390 | 0.03 | PROL5 |
| 212 | 413 | 212720_at | AI670847 | 0.03 | PAPOLA |
| 213 | 351 | 207681_at | NM_001504 | 0.035 | CXCR3 |
| 214 | 202 | 206364_at | NM_014875 | 0.045 | KIF14 |
| 215 | 37 | 212534_at | AU144066 | 0.035 | ZNF24 |
| 216 | 74 | 208687_x_at | AF352832 | 0.03 | HSPA8 |
| 217 | 375 | 210996_s_at | U43430 | 0.035 | YWHAE |
| 218 | 360 | 206556_at | NM_014410 | 0.035 | CLUL1 |
| 219 | 170 | 202315_s_at | NM_004327 | 0.03 | BCR |
| 220 | 147 | 212540_at | BG476661 | 0.03 | CDC34 |
| 221 | 151 | 205798_at | NM_002185 | 0.04 | IL7R |
| 222 | 306 | 210916_s_at | AF098641 | 0.035 | CD44 |
| 223 | 366 | 210417_s_at | U81802 | 0.05 | PIK4CB |
| 224 | 217 | 205885_s_at | L12002 | 0.045 | ITGA4 |
| 225 | 394 | 209754_s_at | AF113682 | 0.035 | TMPO |
| 226 | 192 | 206944_at | AF007141 | 0.045 | HTR6 |
| 227 | 341 | 210166_at | AF051151 | 0.045 | TLR5 |
| 228 | 352 | 207224_s_at | NM_016543 | 0.04 | SIGLEC7 |
| 229 | 83 | 215746_at | L34409 | 0.03 | — |
| 230 | 157 | 210438_x_at | M25077 | 0.03 | SSA2 |
| 231 | 122 | 206327_s_at | NM_004933 | 0.05 | CDH15 |
| 232 | 350 | 213131_at | R38389 | 0.04 | OLFM1 |
| 233 | 30 | 204066_s_at | NM_014914 | 0.035 | CENTG2 |
| 234 | 25 | 213262_at | AI932370 | 0.04 | SACS |
| 235 | 260 | 205962_at | NM_002577 | 0.045 | PAK2 |
| 236 | 238 | 208724_s_at | BC000905 | 0.04 | RAB1A |
| 237 | 428 | 208363_s_at | NM_001566 | 0.05 | INPP4A |
| 238 | 278 | 214565_s_at | NM_012390 | 0.04 | PROL5 |
| 239 | 252 | 213404_s_at | BF033683 | 0.045 | — |
| 240 | 395 | 207245_at | NM_001077 | 0.055 | UGT2B17 |
| 241 | 343 | 205732_s_at | NM_006540 | 0.05 | NCOA2 |
| 242 | 325 | 220266_s_at | NM_004235 | 0.045 | KLF4 |
| 243 | 31 | 206846_s_at | NM_006044 | 0.05 | HDAC6 |
| 244 | 386 | 214602_at | D17391 | 0.05 | COL4A4 |
| 245 | 301 | 217210_at | AL031737 | 0.045 | — |
| 246 | 317 | 208526_at | NM_012369 | 0.065 | OR2F1 |
| 247 | 29 | 212912_at | AI992251 | 0.05 | RPS6KA2 |
| 248 | 407 | 213090_s_at | AI744029 | 0.05 | TAF4 |
| 249 | 72 | 204703_at | NM_006531 | 0.04 | TG737 |
| 250 | 283 | 216857_at | L48728 | 0.045 | — |
| 251 | 227 | 211451_s_at | U24056 | 0.055 | KCNJ4 |
| 252 | 191 | 209726_at | AB018195 | 0.05 | CA11 |
| 253 | 126 | 205683_x_at | NM_003294 | 0.06 | TPSB2 |
| 254 | 132 | 209253_at | AF037261 | 0.055 | SCAM-1 |
| 255 | 187 | 208226_x_at | NM_004194 | 0.045 | ADAM22 |
| 256 | 94 | 209320_at | AF033861 | 0.05 | ADCY3 |
| 257 | 66 | 210358_x_at | BC002557 | 0.05 | GATA2 |
| 258 | 109 | 216065_at | AL031228 | 0.05 | C6orf11 |
| 259 | 46 | 207532_at | NM_006891 | 0.03 | CRYGD |
| 260 | 212 | 208454_s_at | NM_016134 | 0.06 | PGCP |
| 261 | 24 | 206910_x_at | NM_005666 | 0.055 | HFL3 |
| 262 | 69 | 214003_x_at | BF184532 | 0.055 | RPS20 |
| 263 | 425 | 215719_x_at | X83493 | 0.06 | TNFRSF6 |
| 264 | 1 | 207160_at | NM_000882 | 0.05 | IL12A |
| 265 | 347 | 209189_at | BC004490 | 0.065 | FOS |
| 266 | 197 | 206584_at | NM_015364 | 0.065 | LY96 |
| 267 | 263 | 202166_s_at | NM_006241 | 0.06 | PPP1R2 |
| 268 | 273 | 208229_at | NM_022975 | 0.06 | FGFR2 |
| 269 | 344 | 204493_at | NM_001196 | 0.07 | BID |
| 270 | 181 | 211737_x_at | BC005916 | 0.065 | PTN |
| 271 | 177 | 221551_x_at | AB035172 | 0.065 | SIAT7D |
| 272 | 356 | 208743_s_at | BC001359 | 0.065 | YWHAB |
| 273 | 257 | 215131_at | AC002550 | 0.065 | MGC35048 |
| 274 | 148 | 207694_at | NM_000307 | 0.07 | POU3F4 |
| 275 | 244 | 217301_x_at | X71810 | 0.065 | RBBP4 |
| 276 | 13 | 207509_s_at | NM_002288 | 0.07 | LAIR2 |
| 277 | 73 | 216582_at | AL021808 | 0.07 | — |
| 278 | 420 | 213371_at | AI803302 | 0.06 | LDB3 |
| 279 | 36 | 209156_s_at | AY029208 | 0.065 | COL6A2 |
| 280 | 236 | 216817_s_at | AJ302604 | 0.065 | — |
| 281 | 210 | 207867_at | NM_006193 | 0.08 | PAX4 |
| 282 | 43 | 221792_at | AW118072 | 0.08 | — |
| 283 | 174 | 214644_at | BF061074 | 0.07 | HIST1H2AK |
| 284 | 121 | 204065_at | NM_004854 | 0.055 | CHST10 |
| 285 | 138 | 207938_at | NM_015886 | 0.075 | PI15 |
| 286 | 87 | 210880_s_at | AB001467 | 0.075 | EFS |
| 287 | 194 | 214994_at | BF508948 | 0.065 | KIAA0907 |
| 288 | 389 | 206925_at | NM_005668 | 0.085 | SIAT8D |
| 289 | 44 | 208135_at | NM_006481 | 0.065 | TCF2 |
| 290 | 396 | 207392_x_at | NM_001076 | 0.08 | UGT2B15 |
| 291 | 184 | 210229_s_at | M11734 | 0.085 | CSF2 |
| 292 | 408 | 202430_s_at | NM_021105 | 0.07 | PLSCR1 |
| 293 | 242 | 206218_at | NM_002364 | 0.08 | MAGEB2 |
| 294 | 152 | 203421_at | NM_006034 | 0.08 | TP53I11 |
| 295 | 47 | 216699_s_at | L10038 | 0.065 | KLK1 |
| 296 | 268 | 207862_at | NM_006760 | 0.085 | UPK2 |
| 297 | 128 | 216474_x_at | AF206667 | 0.075 | TPSB2 |
| 298 | 230 | 216695_s_at | AF082559 | 0.085 | TNKS |
| 299 | 225 | 206911_at | NM_005082 | 0.085 | ZNF147 |
| 300 | 431 | 211749_s_at | BC005941 | 0.07 | VAMP3 |
| 301 | 60 | 215230_x_at | AA679705 | 0.085 | EIF3S8 |
| 302 | 206 | 207872_s_at | NM_006863 | 0.085 | LILRB1 |
| 303 | 424 | 216908_x_at | AF001549 | 0.085 | — |
| 304 | 378 | 209581_at | BC001387 | 0.085 | HRASLS3 |
| 305 | 358 | 205321_at | NM_001415 | 0.085 | EIF2S3 |
| 306 | 262 | 203755_at | NM_001211 | 0.09 | BUB1B |
| 307 | 246 | 211109_at | U31601 | 0.075 | JAK3 |
| 308 | 98 | 201269_s_at | AB028991 | 0.1 | KIAA1068 |
| 309 | 320 | 221511_x_at | AB033080 | 0.095 | CPR8 |
| 310 | 117 | 215954_s_at | AI200896 | 0.075 | NY-REN-24 |
| 311 | 401 | 210375_at | X83858 | 0.105 | PTGER3 |
| 312 | 404 | 210331_at | AB048365 | 0.09 | KIAA0322 |
| 313 | 264 | 206570_s_at | NM_002785 | 0.08 | PSG11 |
| 314 | 34 | 214534_at | NM_005322 | 0.1 | HIST1H1B |
| 315 | 303 | 214726_x_at | AL556041 | 0.085 | ADD1 |
| 316 | 369 | 205126_at | NM_006296 | 0.09 | VRK2 |
| 317 | 92 | 204159_at | NM_001262 | 0.095 | CDKN2C |
| 318 | 277 | 216652_s_at | AL137673 | 0.095 | DR1 |
| 319 | 93 | 211792_s_at | U17074 | 0.11 | CDKN2C |
| 320 | 293 | 209648_x_at | AL136896 | 0.11 | SOCS5 |
| 321 | 153 | 207403_at | NM_003604 | 0.105 | IRS4 |
| 322 | 142 | 208009_s_at | NM_014448 | 0.115 | ARHGEF16 |
| 323 | 16 | 215778_x_at | AJ006206 | 0.11 | HAB1 |
| 324 | 359 | 214348_at | NM_001057 | 0.09 | TACR2 |
| 325 | 406 | 215993_at | AF070543 | 0.1 | — |
| 326 | 425 | 215719_x_at | X83493 | 0.115 | TNFRSF6 |
| 327 | 327 | 206131_at | NM_001832 | 0.09 | CLPS |
| 328 | 321 | 222156_x_at | AK022459 | 0.09 | CPR8 |
| 329 | 204 | 209961_s_at | M60718 | 0.11 | HGF |
| 330 | 384 | 212617_at | AB002293 | 0.12 | KIAA0295 |
| 331 | 175 | 217192_s_at | AL022067 | 0.12 | PRDM1 |
| 332 | 331 | 206762_at | NM_002234 | 0.115 | KCNA5 |
| 333 | 297 | 206437_at | NM_003775 | 0.115 | EDG6 |
| 334 | 410 | 204073_s_at | NM_013279 | 0.125 | C11orf9 |
| 335 | 111 | 209107_x_at | U19179 | 0.09 | NCOA1 |
| 336 | 209 | 211832_s_at | AF201370 | 0.145 | MDM2 |
| 337 | 101 | 204895_x_at | NM_004532 | 0.115 | MUC4 |
| 338 | 335 | 204643_s_at | NM_006375 | 0.115 | COVA1 |
| 339 | 213 | 206426_at | NM_005511 | 0.115 | MLANA |
| 340 | 234 | 214624_at | AA548647 | 0.145 | UPK1A |
| 341 | 178 | 215266_at | AL096732 | 0.125 | DNAH3 |
| 342 | 124 | 205608_s_at | U83508 | 0.12 | ANGPT1 |
| 343 | 336 | 204668_at | AL031670 | 0.135 | RNF24 |
| 344 | 414 | 209459_s_at | AF237813 | 0.1 | NPD009 |
| 345 | 19 | 209685_s_at | M13975 | 0.15 | PRKCB1 |
| 346 | 319 | 214151_s_at | AU144243 | 0.14 | CPR8 |
| 347 | 418 | 216984_x_at | D84143 | 0.135 | IGLJ3 |
| 348 | 376 | 207236_at | NM_003419 | 0.145 | ZNF345 |
| 349 | 411 | 215599_at | X83300 | 0.13 | SMA3 |
| 350 | 421 | 216887_s_at | AJ133768 | 0.145 | LDB3 |
| 351 | 348 | 216392_s_at | AK021846 | 0.135 | SEC23IP |
| 352 | 81 | 205022_s_at | NM_005197 | 0.13 | CHES1 |
| 353 | 374 | 215157_x_at | AI734929 | 0.14 | PABPC1 |
| 354 | 140 | 207900_at | NM_002987 | 0.16 | CCL17 |
| 355 | 62 | 211988_at | BG289800 | 0.145 | SMARCE1 |
| 356 | 20 | 207504_at | NM_005182 | 0.13 | CA7 |
| 357 | 168 | 207959_s_at | NM_004662 | 0.155 | DNAH9 |
| 358 | 129 | 214487_s_at | NM_002886 | 0.15 | RAP2B |
| 359 | 415 | 209460_at | AF237813 | 0.13 | NPD009 |
| 360 | 312 | 210992_x_at | U90939 | 0.115 | FCGR2A |
| 361 | 282 | 208405_s_at | NM_006016 | 0.185 | CD164 |
| 362 | 370 | 206902_s_at | NM_005728 | 0.175 | ENDOGL1 |
| 363 | 28 | 209453_at | M81768 | 0.125 | SLC9A1 |
| 364 | 214 | 208193_at | NM_000590 | 0.145 | IL9 |
| 365 | 223 | 208042_at | NM_013303 | 0.135 | HSU84971 |
| 366 | 364 | 206826_at | NM_002677 | 0.16 | PMP2 |
| 367 | 119 | 206592_s_at | NM_003938 | 0.16 | AP3D1 |
| 368 | 95 | 209480_at | M16276 | 0.175 | HLA-DQB1 |
| 369 | 228 | 212882_at | AB018338 | 0.17 | KIAA0795 |
| 370 | 339 | 215634_at | AF007137 | 0.185 | — |
| 371 | 97 | 214613_at | AW024085 | 0.185 | GPR3 |
| 372 | 9 | 206376_at | NM_018057 | 0.165 | NTT73 |
| 373 | 102 | 217109_at | AJ242547 | 0.175 | MUC4 |
| 374 | 276 | 209188_x_at | BC002809 | 0.2 | DR1 |
| 375 | 417 | 210567_s_at | BC001441 | 0.175 | SKP2 |
| 376 | 346 | 217056_at | X61070 | 0.195 | — |
| 377 | 258 | 207675_x_at | NM_003976 | 0.155 | ARTN |
| 378 | 328 | 214642_x_at | AI200443 | 0.165 | MAGEA5 |
| 379 | 183 | 216867_s_at | X03795 | 0.195 | PDGFA |
| 380 | 208 | 204849_at | NM_006602 | 0.195 | TCFL5 |
| 381 | 135 | 216939_s_at | Y08756 | 0.205 | HTR4 |
| 382 | 23 | 209530_at | U07139 | 0.2 | CACNB3 |
| 383 | 15 | 215175_at | AB023212 | 0.21 | PCNX |
| 384 | 185 | 209651_at | BC001830 | 0.195 | TGFB1I1 |
| 385 | 292 | 205339_at | NM_003035 | 0.225 | SIL |
| 386 | 287 | 209737_at | AB014605 | 0.205 | AIP1 |
| 387 | 186 | 206616_s_at | AF155382 | 0.225 | ADAM22 |
| 388 | 201 | 212819_at | AF055024 | 0.22 | ASB1 |
| 389 | 35 | 205498_at | NM_000163 | 0.205 | GHR |
| 390 | 239 | 214111_at | AF070577 | 0.195 | OPCML |
| 391 | 21 | 213106_at | AI769688 | 0.21 | ATP8A1 |
| 392 | 368 | 214456_x_at | M23699 | 0.225 | SAA2 |
| 393 | 221 | 200797_s_at | AI275690 | 0.235 | MCL1 |
| 394 | 115 | 213815_x_at | AI913329 | 0.24 | NY-REN-24 |
| 395 | 3 | 215935_at | AL080148 | 0.235 | DKFZP434B204 |
| 396 | 52 | 204316_at | W19676 | 0.235 | RGS10 |
| 397 | 17 | 216875_x_at | X83412 | 0.215 | HAB1 |
| 398 | 409 | 215996_at | AI446234 | 0.215 | — |
| 399 | 48 | 202555_s_at | NM_005965 | 0.2 | MYLK |
| 400 | 190 | 216993_s_at | U32169 | 0.255 | COL11A2 |
| 401 | 385 | 212461_at | BF793951 | 0.235 | OAZIN |
| 402 | 63 | 215781_s_at | D87012 | 0.25 | TOP3B |
| 403 | 99 | 209361_s_at | BC004153 | 0.215 | PCBP4 |
| 404 | 330 | 213363_at | AW170549 | 0.235 | na |
| 405 | 78 | 214948_s_at | AL050136 | 0.245 | — |
| 406 | 159 | 207222_at | NM_003561 | 0.27 | PLA2G10 |
| 407 | 100 | 213840_s_at | R68573 | 0.23 | MRPS12 |
| 408 | 145 | 210306_at | U89358 | 0.285 | L3MBTL |
| 409 | 123 | 206328_at | NM_004933 | 0.23 | CDH15 |
| 410 | 245 | 211108_s_at | U31601 | 0.28 | JAK3 |
| 411 | 134 | 213221_s_at | AB018324 | 0.27 | KIAA0781 |
| 412 | 198 | 212561_at | AA349595 | 0.27 | RAB6IP1 |
| 413 | 189 | 208237_x_at | AF155381 | 0.28 | ADAM22 |
| 414 | 139 | 217060_at | U03115 | 0.235 | — |
| 415 | 176 | 220937_s_at | NM_014403 | 0.265 | SIAT7D |
| 416 | 169 | 210345_s_at | AF257737 | 0.29 | DNAH9 |
| 417 | 323 | 206577_at | NM_003381 | 0.33 | VIP |
| 418 | 4 | 204919_at | NM_007244 | 0.29 | PROL4 |
| 419 | 55 | 216283_s_at | X64116 | 0.285 | PVR |
| 420 | 77 | 214096_s_at | AW190316 | 0.27 | LOC56901 |
| 421 | 32 | 216224_s_at | AK024083 | 0.31 | HDAC6 |
| 422 | 274 | 211349_at | AB001328 | 0.34 | SLC15A1 |
| 423 | 50 | 215766_at | AL096729 | 0.335 | GSTA1 |
| 424 | 281 | 216252_x_at | Z70519 | 0.32 | TNFRSF6 |
| 425 | 163 | 214463_x_at | NM_003541 | 0.365 | HIST1H4K |
| 426 | 219 | 209245_s_at | AB014606 | 0.295 | KIF1C |
| 427 | 52 | 204316_at | W19676 | 0.31 | RGS10 |
| 428 | 237 | 207044_at | NM_000461 | 0.31 | THRB |
| 429 | 261 | 207143_at | NM_001259 | 0.39 | CDK6 |
| 430 | 216 | 214872_at | AL080129 | 0.3 | DKFZP434D193 |
| 431 | 103 | 217110_s_at | AJ242547 | 0.475 | MUC4 |

Table 4: Shown are the average errors of the differentiating genes in predicting a prognosis (poor or good clinical outcome) of the MS test group based on a model computed for each gene or a group of genes in the MS training set group. The ascending order of genes reflects combinations of genes, where each row includes the gene specified in that row and in all preceding rows. For example, the average error presented in row number 4 reflects the average error in predicting clinical outcome of MS of the group of genes described in 1, 2, 3 and 4 (i.e., SEQ ID NOs: 158, 68, 5 and 58).
Probeset ID = Affymetrix ID.

[0146] As shown in Table 4 hereinabove, the predictive power of each set of genes was evaluated using the MS training and test sets of samples. The polynucleotide exhibiting the best predictive power in determining MS prognosis (i.e., poor or good prognosis/clinical outcome) was the polynucleotide set forth by SEQ ID NO:158 (GenBank Accession No. NM_{—}005012; row No. 1 in Table 4), in which the average error between the test and training groups was “0” (zero) (100% accuracy). Similarly, the combination genes set forth by SEQ ID NOs: 158 and 68 (GenBank Accession No. NM_{—}001023; row No. 2 in Table 4) displayed a predictive power with “0” average error. Another exemplary combination is shown in row number 4 in Table 4, in which the combination of the polynucleotides set forth by SEQ ID NOs:158, 68, 5 and 58 displayed a high predictive power with “0” average error. Thus, this analysis enables one skilled in the art to select a group of polynucleotides which can give the best predictive power for the clinical outcome/prognosis of MS subjects.

[0147] It is appreciated that certain features of the invention, which are, for clarity, described in the context of separate embodiments, may also be provided in combination in a single embodiment. Conversely, various features of the invention, which are, for brevity, described in the context of a single embodiment, may also be provided separately or in any suitable sub combination.

[0148] Although the invention has been described in conjunction with specific embodiments thereof, it is evident that many alternatives, modifications and variations will be apparent to those skilled in the art. Accordingly, it is intended to embrace all such alternatives, modifications and variations that fall within the spirit and broad scope of the appended claims. All publications, patents and patent applications mentioned in this specification are herein incorporated in their entirety by reference into the specification, to the same extent as if each individual publication, patent or patent application was specifically and individually indicated to be incorporated herein by reference. In addition, citation or identification of any reference in this application shall not be construed as an admission that such reference is available as prior art to the present invention.

### REFERENCES

### Additional References are Cited in Text

[0149] 1. Confavreux C, Vukusic S. Natural history of multiple sclerosis: implications for counselling and therapy. Curr Opin Neurol 2002; 15: 257-66.
[0150] 2. Trojano M, Paolicelli D, Bellacosa A, Cataldo S. The transition from relapsing-remitting MS to irreversible disability: clinical evaluation. Neurol Sci 2003; 24 (Suppl 5): S268-70.
[0151] 3. Simon J H. Contrast-enhanced MR imaging in the evaluation of treatment response and prediction of outcome in multiple sclerosis. J Magn Reson Imaging 1997; 7:29-37.
[0152] 4. Benedict R H, Weinstock-Guttman B, Fishman I, Sharma J, Tjoa C W, Bakshi R. Prediction of neuropsychological impairment in multiple sclerosis: comparison of conventional magnetic resonance imaging measures of atrophy and lesion burden. Arch Neurol 2004; 61:226-30.
[0153] 5. Mantripragada K K, Buckley P G, de Stahl T D, Dumanski J P. Genomic microarrays in the spotlight. Trends Genet 2004; 20: 87-94.
[0154] 6. Achiron A, Gurevich M, Friedman N, Kaminski N, Mandel M. Blood transcriptional signatures of multiple sclerosis: unique gene expression of disease activity. Ann Neurol 2004; 55: 410-7.
[0155] 7. Kurtzke J F. Rating neurologic impairment in multiple sclerosis: an expanded disability status scale (EDSS). Neurology 1983; 33: 1444-52.
[0156] 8. Li C, Wong W H. Model-based analysis of oligonucleotide arrays: expression index computation and outlier detection. Proc Natl Acad Sci USA 2001; 98: 31-6.
[0157] 9. Eisen M B, Spellman P T, Brown P O, Botstein D. Cluster analysis and display of genome-wide expression patterns. Proc Natl Acad Sci USA 1998; 95: 14863-8.
[0158] 10. Kaminski N, Friedman N. Practical approaches to analyzing results of microarray experiments. Am J Respir Cell Mol Biol 2002; 27: 125-32.
[0159] 11. Ben-Dor A, Bruhn L, Friedman N, Nachman I, Schummer M, Yakhini Z. Tissue classification with gene expression profiles. J Comput Biol 2000; 7: 559-83.
[0160] 12. Furey T S, Cristianini N, Duffy N, Bednarski D W, Schummer M, Haussler D. Support vector machine classification and validation of cancer tissue samples using microarray expression data. Bioinformatics 2000; 16:906-14.
[0161] 13. Statnikov A, Aliferis C F, Tsamardinos I, Hardin D, Levy S. A comprehensive evaluation of multicategory classification methods for microarray gene expression cancer diagnosis. Bioinformatics 2005; 21:631-43.
[0162] 14. Jain A K, Zongker D. Feature selection-evaluation, application, and small sample performance. IEEE Trans. On Pattern Analysis and Machine Intelligence 1997; 19:153-158.
[0163] 15. Aha D W, Bankert R L. A comparative evaluation of sequential feature selection algorithms. In: Proceedings of 5th International Workship on Artificial Intelligence and statistics. D. Fisher, J. H. Lenx (Eds.), New York: Springer-Verlag, 1995, pp 1-7.
[0164] 16. Goodkin D E, Hertsgaard D, Rudick R A. Exacerbation rates and adherence to disease type in a prospectively followed-up population with multiple sclerosis. Implications for clinical trials. Arch Neurol 1989; 46: 1107-12.
[0165] 17. Kurtzke J F, Beebe G W, Nagler B, Kurland L T, Auth T L. Studies on the natural history of multiple sclerosis—8. Early prognostic features of the later course of the illness. J Chronic Dis 1977; 30: 819-30.
[0166] 18. Weinshenker B G. The natural history of multiple sclerosis: update 1998. Semin Neurol 1998; 18: 301-7.
[0167] 19. Weinshenker B G, Rice G P A, Noseworthy J H, Carriere W, Baskerville J, Ebers G C. The natural history of multiple sclerosis: a geographically bases study: 3. Multivariate analysis of predictive factors and models of outcome. Brain 1991; 114:1045-56.
[0168] 20. Runmarker B, Andersen O. Prognostic factors in a multiple sclerosis incidence cohort with 25 years of follow-up. Brain 1993; 116:117-34.
[0169] 21. Kantarci O H, Weinshenker B G. Prognostic factors in multiple sclerosis. In: Cook D S. (Ed.), Handbook of Multiple Sclerosis, 3rd ed, Marcel and Dekker, New York, 2001, pp. 449-63.
[0170] 22. Tremlett H, Paty D, Devonshire V. Disability progression in multiple sclerosis is slower than previously reported. Neurology 2006; 66:172-7.
[0171] 23. Zhang W, Geiman D E, Shields J M, Dang D T, Mahatan C S, Kaestner K H, Biggs J R, Kraft A S, Yang V W. The gut-enriched Kruppel-like factor (Kruppel-like factor 4) mediates the transactivating effect of p53 on the p21WAF1/Cipl promoter. J Biol Chem 2000; 275:18391-8.
[0172] 24. Chen Z Y, Shie J L, Tseng C C. STAT1 is required for IFN-gamma-mediated gut-enriched Kruppel-like factor expression. Exp Cell Res. 2002; 281:19-27.
[0173] 25. Petzold A, Eikelenboom M J, Gveric D, Keir G, Chapman M, Lazeron R H, Cuzner M L, Polman C H, Uitdehaag B M, Thompson E J, Giovannoni G. Markers for different glial cell responses in multiple sclerosis: clinical and pathological correlations. Brain 2002; 125(Pt 7):1462-73.
[0174] 26. Petzold A, Brassat D, Mas P, Rejdak K, Keir G, Giovannoni G, Thompson E J, Clanet M. Treatment response in relation to inflammatory and axonal surrogate marker in multiple sclerosis. Mult Scler 2004; 10:281-3.
[0175] 27. Faffe D S, Whitehead T, Moore P E, Baraldo S, Flynt L, Bourgeois K, Panettieri R A, Shore S A. IL-13 and IL-4 promote TARC release in human airway smooth muscle cells: role of IL-4 receptor genotype. Am J Physiol Lung Cell Mol Physiol 2003; 285:L907-14.
[0176] 28. Dabbagh K, Takeyama K, Lee H M, Ueki I F, Lausier J A, Nadel J A. IL-4 induces mucin gene expression and goblet cell metaplasia in vitro and in vivo. J Immunol 1999; 162:6233-7.
[0177] 29. Zhu Z, Lee C G, Zheng T, Chupp G, Wang J, Horner R J, Noble P W, Hamid Q, Elias J A. Airway inflammation and remodeling in asthma. Lessons from interleukin 11 and interleukin 13 transgenic mice. Am J Respir Crit Care Med 2001; 164 (10 Pt 2):S67-70.
[0178] 30. Soto P, Price-Schiavi S A, Carraway K L. SMAD2 and SMAD7 involvement in the post-translational regulation of Muc4 via the transforming growth factor-beta and interferon-gamma pathways in rat mammary epithelial cells. J Biol Chem 2003; 278:20338-44.
[0179] 31. Achour A, Laaroubi D, Caruelle D, Barritault D, Courty J. The angiogenic factor heparin affin regulatory peptide (HARP) induces proliferation of human peripheral blood mononuclear cells. Cell Mol Biol 2001; 47:0 L73-7.
[0180] 32. Heroult M, Bernard-Pierrot I, Delbe J, Hamma-Kourbali Y, Katsoris P, Barritault D, Papadimitriou E, Plouet J, Courty J. Heparin affin regulatory peptide binds to vascular endothelial growth factor (VEGF) and inhibits VEGF-induced angiogenesis. Oncogene 2004; 23:1745-53.

1. A method of predicting a prognosis of a subject diagnosed with multiple sclerosis, the method comprising determining in a cell of the subject a level of expression of at least one polynucleotide sequence selected from the group consisting of SEQ ID NOs:158, 68, 5, 58, 329, 120, 380, 342, 88, 166, 266, 51, 310, 91, 427, 22, 84, 269, 388, 155, 333, 215, 195, 419, 75, 125, 11, 251, 253, 337, 110, 222, 56, 324, 156, 7, 57, 233, 149, 363, 107, 193, 393, 265, 160, 41, 38, 90, 70, 85, 403, 304, 426, 240, 49, 294, 136, 150, 232, 10, 392, 89, 332, 290, 422, 291, 114, 309, 203, 362, 397, 334, 302, 179, 171, 53, 402, 315, 271, 218, 154, 243, 211, 180, 412, 300, 131, 71, 398, 289, 371, 118, 220, 82, 42, 430, 64, 144, 2, 205, 405, 318, 146, 314, 12, 416, 267, 105, 353, 296, 224, 165, 113, 345, 387, 61, 250, 59, 235, 382, 143, 361, 372, 199, 79, 116, 162, 322, 354, 391, 377, 255, 270, 373, 104, 400, 67, 167, 423, 188, 182, 106, 54, 326, 164, 307, 383, 260, 340, 357, 390, 161, 6, 316, 272, 338, 241, 367, 379, 40, 381, 231, 39, 256, 286, 8, 151, 399, 33, 254, 295, 141, 429, 65, 229, 259, 355, 298, 173, 371, 86, 45, 305, 127, 133, 200, 313, 370, 112, 226, 249, 80, 299, 196, 27, 308, 288, 349, 108, 311, 14, 130, 285, 207, 365, 275, 284, 96, 172, 76, 279, 413, 351, 202, 37, 74, 375, 360, 170, 147, 151, 306, 366, 217, 394, 192, 341, 352, 83, 157, 122, 350, 30, 25, 260, 238, 428, 278, 252, 395, 343, 325, 31, 386, 301, 317, 29, 407, 72, 283, 227, 191, 126, 132, 187, 94, 66, 109, 46, 212, 24, 69, 425, 1, 347, 197, 263, 273, 344, 181, 177, 356, 257, 148, 244, 13, 73, 420, 36, 236, 210, 43, 174, 121, 138, 87, 194, 389, 44, 396, 184, 408, 242, 152, 47, 268, 128, 230, 225, 431, 60, 206, 424, 378, 358, 262, 246, 98, 320, 117, 401, 404, 264, 34, 303, 369, 92, 277, 93, 293, 153, 142, 16, 359, 406, 425, 327, 321, 204, 384, 175, 331, 297, 410, 111, 209, 101, 335, 213, 234, 178, 124, 336, 414, 19, 319, 418, 376, 411, 421, 348, 81, 374, 140, 62, 20, 168, 129, 415, 312, 282, 370, 28, 214, 223, 364, 119, 95, 228, 339, 97, 9, 102, 276, 417, 346, 258, 328, 183, 208, 135, 23, 15, 185, 292, 287, 186, 201, 35, 239, 21, 368, 221, 115, 3, 52, 17, 409, 48, 190, 385, 63, 99, 330, 78, 159, 100, 145, 123, 245, 134, 198, 189, 139, 176, 169, 323, 4, 55, 77, 32, 274, 50, 281, 163, 219, 52, 237, 261, 216, 103, wherein an alteration above a predetermined threshold in said level of expression of said at least one polynucleotide sequence in said cell of the subject relative to a level of expression of said at least one polynucleotide sequence in a reference cell is indicative of the prognosis of the subject diagnosed with multiple sclerosis.

2. A method of treating a subject diagnosed with multiple sclerosis, the method comprising:
predicting a prognosis of a subject diagnosed with multiple sclerosis according to the method of claim 1, and;
(b) selecting a treatment regimen based on said prognosis;
thereby treating the subject diagnosed with multiple sclerosis.

3-4. (canceled)

5. A probeset comprising a plurality of oligonucleotides and no more than 700 oligonucleotides wherein each of said plurality of oligonucleotides is capable of specifically recognizing at least one polynucleotide sequence selected from the group consisting of SEQ ID NOs:158, 68, 5, 58, 329, 120, 380, 342, 88, 166, 266, 51, 310, 91, 427, 22, 84, 269, 388, 155, 333, 215, 195, 419, 75, 125, 11, 251, 253, 337, 110, 222, 56, 324, 156, 7, 57, 233, 149, 363, 107, 193, 393, 265, 160, 41, 38, 90, 70, 85, 403, 304, 426, 240, 49, 294, 136, 150, 232, 10, 392, 89, 332, 290, 422, 291, 114, 309, 203, 362, 397, 334, 302, 179, 171, 53, 402, 315, 271, 218, 154, 243, 211, 180, 412, 300, 131, 71, 398, 289, 371, 118, 220, 82, 42, 430, 64, 144, 2, 205, 405, 318, 146, 314, 12, 416, 267, 105, 353, 296, 224, 165, 113, 345, 387, 61, 250, 59, 235, 382, 143, 361, 372, 199, 79, 116, 162, 322, 354, 391, 377, 255, 270, 373, 104, 400, 67, 167, 423, 188, 182, 106, 54, 326, 164, 307, 383, 260, 340, 357, 390, 161, 6, 316, 272, 338, 241, 367, 379, 40, 381, 231, 39, 256, 286, 8, 151, 399, 33, 254, 295, 141, 429, 65, 229, 259, 355, 298, 173, 371, 86, 45, 305, 127, 133, 200, 313, 370, 112, 226, 249, 80, 299, 196, 27, 308, 288, 349, 108, 311, 14, 130, 285, 207, 365, 275, 284, 96, 172, 76, 279, 413, 351, 202, 37, 74, 375, 360, 170, 147, 151, 306, 366, 217, 394, 192, 341, 352, 83, 157, 122, 350, 30, 25, 260, 238, 428, 278, 252, 395, 343, 325, 31, 386, 301, 317, 29, 407, 72, 283, 227, 191, 126, 132, 187, 94, 66, 109, 46, 212, 24, 69, 425, 1, 347, 197, 263, 273, 344, 181, 177, 356, 257, 148, 244, 13, 73, 420, 36, 236, 210, 43, 174, 121, 138, 87, 194, 389, 44, 396, 184, 408, 242, 152, 47, 268, 128, 230, 225, 431, 60, 206, 424, 378, 358, 262, 246, 98, 320, 117, 401, 404, 264, 34, 303, 369, 92, 277, 93, 293, 153, 142, 16, 359, 406, 425, 327, 321, 204, 384, 175, 331, 297, 410, 111, 209, 101, 335, 213, 234, 178, 124, 336, 414, 19, 319, 418, 376, 411, 421, 348, 81, 374, 140, 62, 20, 168, 129, 415, 312, 282, 370, 28, 214, 223, 364, 119, 95, 228, 339, 97, 9, 102, 276, 417, 346, 258, 328, 183, 208, 135, 23, 15, 185, 292, 287, 186, 201, 35, 239, 21, 368, 221, 115, 3, 52, 17, 409, 48, 190, 385, 63, 99, 330, 78, 159, 100, 145, 123, 245, 134, 198, 189, 139, 176, 169, 323, 4, 55, 77, 32, 274, 50, 281, 163, 219, 52, 237, 261, 216, 103.

6. The probeset of claim 3, wherein each of said isolated nucleic acid sequences or said plurality of oligonucleotides is bound to a solid support.

7. The probeset of claim 6, wherein said plurality of oligonucleotides are bound to said solid support in an addressable location.

8. The method of claim 1, wherein said reference cell is of a subject diagnosed with multiple sclerosis which displayed within a period of two years an increase of at least 0.5 point in an Expanded Disability Status Scale (EDSS).

9. The method of claim 1, wherein said reference cell is of a subject diagnosed with multiple sclerosis which displayed within a period of two years no change in an Expanded Disability Status Scale (EDSS).

10. The method of claim 8, wherein said alteration is upregulation of said expression level of said at least one polynucleotide sequence in said cell of the subject relative to said reference cell, whereas said at least one polynucleotide sequence is selected from the group consisting of SEQ ID NOs:1-193.

11. The method of claim 10, wherein said prognosis comprises no change in an Expanded Disability Status Scale (EDSS) of the subject within a period of two years.

12. The method of claim 11, wherein said prognosis further comprises no relapses within said period of said two years.

13. The method of claim 9, wherein said alteration is upregulation of said expression level of said at least one polynucleotide sequence in said cell of the subject relative to said reference cell, whereas said at least one polynucleotide sequence is selected from the group consisting of SEQ ID NOs:194-431.

14. The method of claim 13, wherein said prognosis comprises an increase of at least 0.5 point in an Expanded Disability Status Scale (EDSS) of the subject within a period of at least two years.

15. The method of claim 1, wherein said detecting said level of expression is effected using an RNA detection method.

16-18. (canceled)

19. The method of claim 1, wherein said at least one polynucleotide sequence is selected from the group consisting of SEQ ID NOs:156, 143, 127, 46, 311, 140, 74, 276, 180, 182, 191, 61, 306, 115, 97, 303, 272, 50, 16, 63, 117, 406, 423, 128, 277, 47, 17, 424, 418, 190, 139, 102, 103 and 325.

20. The method of claim 1, wherein said at least one polynucleotide sequence is selected from the group consisting of SEQ ID NOs:127, 423, 16, 17, 424, 190 and 325.

21. The method of claim 1, wherein said at least one polynucleotide comprises the 7 polynucleotides set forth by SEQ ID NOs:127, 423, 16, 17, 424, 190 and 325.

22. (canceled)

23. The method of claim 1, wherein said at least one polynucleotide sequence is set forth in SEQ ID NO:158.

24. The method of claim 1, wherein said at least one polynucleotide comprises the polynucleotide sequences set forth in SEQ ID NOs:158, 68, 5, 58, 329 and 120.

25. The method of claim 1 wherein said detecting said level of expression is effected using a protein detection method.

26. A kit for predicting a prognosis of a subject diagnosed with multiple sclerosis, comprising the probeset of claim 5 and a reference cell.

27. The kit of claim 26, further comprising packaging materials packaging said at least one reagent and instructions for use in determining the prognosis of the subject diagnosed with multiple sclerosis.

The application's sequence listing, which the Patent Office published only in electronic form, follows.

SEQUENCE LISTING (431 sequences)

SEQ ID NO: 1 - DNA, 1026 bp, Homo sapiens
gaattcccagaaagcaagagaccagagtcccgggaaagtcctgccgcgcctcgggacaattataaaaatgtggccccctgggtcagcctcccagccaccgccctcacctgccgcggccacaggtctgcatccagcggctcgccctgtgtccctgcagtgccggctcagcatgtgtccagcgcgcagcctcctccttgtggctaccctggtcctcctggaccacctcagtttggccagaaacctccccgtggccactccagacccaggaatgttcccatgccttcaccactcccaaaacctgctgagggccgtcagcaacatgctccagaaggccagacaaactctagaattttacccttgcacttctgaagagattgatcatgaagatatcacaaaagataaaaccagcacagtggaggcctgtttaccattggaattaaccaagaatgagagttgcctaaattccagagagacctctttcataactaatgggagttgcctggcctccagaaagacctcttttatgatggccctgtgccttagtagtatttatgaagacttgaagatgtaccaggtggagttcaagaccatgaatgcaaagcttctgatggatcctaagaggcagatctttctagatcaaaacatgctggcagttattgatgagctgatgcaggccctgaatttcaacagtgagactgtgccacaaaaatcctcccttgaagaaccggatttttataaaactaaaatcaagctctgcatacttcttcatgctttcagaattcgggcagtgactattgacagagtgacgagctatctgaatgcttcctaaaaagcgaggtccctccaaaccgttgtcatttttataaaactttgaaatgaggaaactttgataggatgtggattaagaactagggagggggaaagaaggatgggactattacatccacatgatacctctgatcaagtatttttgacatttactgtggataaattgtttttaagttttcatgaatgaattgctaagaa

SEQ ID NO: 2 - DNA, 2648 bp, Homo sapiens
ggcacagggcgaggttttatacacctgaaagaagagaatgtcaagacgaagtagccgtttacaagctaagcagcagccccagcccagccagacggaatccccccaagaagcccagataatccaggccaagaagaggaaaactacccaggatgtcaaaaaaagaagagaggaggtcaccaagaaacatcagtatgaaattaggaattgttggccacctgtattatctggggggatcagtccttgcattatcattgaaacacctcacaaagaaataggaacaagtgatttctccagatttacaaattacagatttaaaaatctttttattaatccttcacctttgcctgatttaagctggggatgttcaaaagaagtctggctaaacatgttaaaaaaggagagcagatatgttcatgacaaacattttgaagttctgcattctgacttggaaccacagatgaggtccatacttctagactggcttttagaggtatgtgaagtatacacacttcatagggaaacattttatcttgcacaagacttttttgatagatttatgttgacacaaaaggatataaataaaaatatgcttcaactcattggaattacctcattattcattgcttccaaacttgaggaaatctatgctcctaaactccaagagtttgcttacgtcactgatggtgcttgcagtgaagaggatatcttaaggatggaactcattatattaaaggctttaaaatgggaactttgtcctgtaacaatcatctcctggctaaatctctttctccaagttgatgctcttaaagatgctcctaaagttcttctacctcagtattctcaggaaacattcattcaaatagctcagcttttagatctgtgtattctagccattgattcattagagttccagtacagaatactgactgctgctgccttgtgccattttacctccattgaagtggttaagaaagcctcaggtttggagtgggacagtatttcagaatgtgtagattggatggtaccttttgtcaatgtagtaaaaagtactagtccagtgaagctgaagacttttaagaagattcctatggaagacagacataatatccagacacatacaaactatttggctatgctggaggaagtaaattacataaacaccttcagaaaagggggacagttgtcaccagtgtgcaatggaggcattatgacaccaccgaagagcactgaaaaaccaccaggaaaacactaaagaagataactaagcaaacaagttggaattcaccaagattgggtagaactggtatcactgaactactaaagttttacagaaagtagtgctgtgattgattgccctagccaattcacaagttacactgccattctgattttaaaacttacaattggcactaaagaatacatttaattatttcctatgttagctgttaaagaaacagcaggacttgtttacaaagatgtcttcattcccaaggttactggatagaagccaaccacagtctataccatagcaatgtttttcctttaatccagtgttactgtgtttatcttgataaactaggaattttgtcactggagttttggactggataagtgctaccttaaagggtatactaagtgatacagtactttgaatctagttgttagattctcaaaattcctacactcttgactagtgcaatttggttcttgaaaattaaatttaaacttgtttacaaaggtttagttttgtaataaggtgactaatttatctatagctgctatagcaagctattataaaacttgaatttctacaaatggtgaaatttaatgttttttaaactagtttatttgccttgccataacacattttttaactaataaggcttagatgaacatggtgttcaacctgtgctctaaacagtgggagtaccaaagaaattataaacaagataaatgctgtggctccttcctaactggggctttcttgacatgtaggttgcttggtaataacctttttgtatatcacaatttgggtgaaaaacttaagtaccctttcaaactatttatatgaggaagtcactttactactctaagatatccctaaggaatttttttttttaatttagtgtgactaaggctttatttatgtttgtgaaactgttaaggtcctttctaaattcctccattgtgagataaggacagtgtcaaagtgataaagcttaacacttgacctaaacttctattttcttaaggaagaagagtattaaatatatactgactcctagaaatctatttattaaaaaaagacatgaaaacttgctgtacataggctagctatttctaaatattttaaattagcttttctaaaaaaaaaatccagcctcataaagtagattagaaaactagattgctagtttattttgttatcagatatgtgaatctcttctccctttgaagaaactatacatttattgttacggtatgaagtcttctgtatagtttgtttttaaactaatatttgtttcagtattttgtctgaaaagaaaacaccactaattgtgtacatatgtattatataaacttaaccttttaatactgtttatttttagcccattgtttaaaaaataaaagttaaaaaaatttaaaaa

SEQ ID NO: 3 - DNA, 3251 bp, Homo sapiens
gatttgggaagaaaaagaaaatgttggatcatttacaaatcgaatgaccccagaaaagcacttaaattctttgcggaatttggctaaatcattggatgctgagcaggacaccacaaacccaaaacccttctggaacatgggagagaactcgaaacagctgcccggacctcagaagctctcagatcctaggctctggcaggaaagtttttggaagaattatagccagcttttctggggcctcccctctctgcacagcgagtccctggtggctaacgcctgggtaactgacaggtcttatactttacagtctcctcctttcttgttcaatgaaatgtccaatgtctgcccaattcaaagggagactacaatgtccccactgcttttccaggcccagcccctgtcccatctggggcccgagtgccaaccctttatttcatccacaccccaattccggcccacacctatggctcaggccgaggctcaggcccatcttcaatcttctttcccagtcctatctcctgcttttccatccctgattcagaacactggagtagcttgccctgcatcgcagaataaagtgcaagctctctccctacctgaaactcagcaccctgaatggcctttgttgaggagacaactagaaggtaggttggctttaccctctagggtccaaaaatctcaggacgtctttagtgtctccactcctaaccttccccaggaaagtttgacatccattctgcctgagaactttccagtcagtcctgaactccggagacaactggagcaacacataaaaaagtggatcatccaacactggggcaacctgggaaggatccaagagtctctggatctgatgcagcttcaggacgaatcaccagggacaagtcaggccaagggcaaacccagtccctggcagtcctccatgtccacaggtgaaagcagcaaggaggcacagaaggtgaagttccagctagagagggacccgtgcccacatctggggcaaattctgggtgagaccccacaaaatctatccagggatatgaaaagcttcccacggaaggttctgggggtgacttctgaggagttggaaaggaacttgaggaagcccttgaggagtgactcgggaagtgatttattaagatgcacagagaggactcatatagaaaacatcctgaaagcccacatgggcaggaacttgggccagaccaacgagggcttgatccccgtgcgtgtgcgtcgatcctggcttgctgtcaaccaggctcttcccgtgtccaacacccatgtgaaaaccagcaatctagcagccccgaaaagtgggaaagcctgtgtgaacacagcccaggtgctttccttcctcgagccgtgtactcagcaggggttgggagcccatattgtgaggttttgggccaaacacaggtggggtctacccctcagggtcctcaagcccattcagtgctttaaactggaaaaggtttcatccttgtcccttacacagcttgctggtccctcctcagccacctgtgaatctggggctggctcagaagttgaggtggacatgttccttagaaagccaccaatggcaagtctgagaaagcaggtgctgaccaaagcatctgatcacatgccagagagtcttctggcctcctcacctgcatggaagcagttccagagggcaccgcgaggaatcccatcttggaatgatcatgaacccttgaagcctcctccagctggacaggagggcaggtggccatctaagcccctcacgtacagcctcacaggcagcacccagcagagcaggagcttaggagcccaatcttcaaaggctggagagacaagggaggcagtgccacaatgcagagtccccttggaaacctgtatgctggcaaacctccaagccacaagtgaggatgtgcatggtttcgaggctccagggaccagcaaaagctctctacaccctagagtgtctgtctcccaagatccaagaaagctgtgtcttatggaggaggttgttagtgaatttgagcctggaatggccacaaagtcagagacccagcctcaagtttgtgccgctgttgtgctccttccagatgggcaagcatctgttgtgccccacgcttcagagaatttggtttctcaagtgccccagggccatctccagagcatgcctactgggaacatgcgggcttcccaggagctacatgacctcatggcagccagaaggagcaaactggtgcacgaggagcccagaaaaccaaactgtcaaggctcatgcaagagccaaaggccaatgtttccccctattcacaagagtgagaagtttaggaagcccaacttagaaaaacatgaagaaaggcttgaaggattgaggactcctcaacttaccccagtcaggaaaacagaagacacccatcaggatgaaggcgtccagctactgcaatcaaagaaacagcctccttcagtaagcccctttggagaaaacatcaagcaaatttttcagtggattttttcaaagaaaaaaagcaagccagcaccagtcactgctgagagccaaaaaacagtaaaaaacagatcatgtgtgtacagcagcagtgctgaagctcagggtctcatgacggcagttggacaaatgctggacgagaaaatgtcactttgccatgcgcgccatgcctcgaaggtaaatcagcacaaacagaagtttcaagccccagtctgtgggtttccctgcaaccacaggcacctcttctactcagaacacggcagaatactgagctatgcagccagcagtcaacaagccactctcaagagccagggttgtcccaacagagacagacaaatcagaaatcaacagcccttgaaaagtgtgcggtgcaacaatgagcaatggggcctgcgacatccccaaatcttgcaccccaagaaagctgtatccccagtcagtccccctcagcactggccgaagacatccggtgcctctagccaccatcaccactgtccaaggcactgtcttctttgggaaggtatctgatttggtcagtcacaaattcttttttagccttccctggagaaaaacaagtccccaagaaaaaattcactctatgtagagaaaaaatattttctctcatgttagtacatgcagaacatttaatattccacaatatatatggttttttattcaaaaaaaaaaaaaaaaaaaaaaaaaaaaaaaaaaaaaaaaaaaaaaaaaaaaaaaaaaaaaaaaaaaaaaaaaa

SEQ ID NO: 4 - DNA, 507 bp, Homo sapiens
cagagcctccttcaagatgctgctggtcctgctctcagtggtccttctggctctgagctcagctcagagcacagataatgatgtgaactatgaagactttactttcaccataccagatgtagaggactcaagtcagagaccagatcagggaccccagagacctcctcctgaaggactcctacctagaccccctggtgatagtggtaaccaagatgatggtcctcagcagagaccaccaaaaccaggaggccatcaccgccatcctcccccacctccttttcaaaatcagcaacgaccaccccaacgaggacaccgtcaactctctctaccccgatttccttctgtcagcctgcaggaagcatcatcattcttccggagggacagaccagcaagacatccccaggagcaaccactctggtaatctagaattcagtggcagaaaataaataagaagataacttccttcagaaagccatgacattgaaataatgtggtcataactctttc

SEQ ID NO: 5 - DNA, 2444 bp, Homo sapiens
ggcacgaggcggggccgggtcgcagctgggcccgcggcatggacgaactgttccccctcatcttcccggcagagcagcccaagcagcggggcatgcgcttccgctacaagtgcgaggggcgctccgcgggcagcatcccaggcgagaggagcacagataccaccaagacccaccccaccatcaagatcaatggctacacaggaccagggacagtgcgcatctccctggtcaccaaggaccctcctcaccggcctcacccccacgagcttgtaggaaaggactgccgggatggcttctatgaggctgagctctgcccggaccgctgcatccacagtttccagaacctgggaatccagtgtgtgaagaagcgggacctggagcaggctatcagtcagcgcatccagaccaacaacaaccccttccaagttcctatagaagagcagcgtggggactacgacctgaatgctgtgcggctctgcttccaggtgacagtgcgggacccatcaggcaggcccctccgcctgccgcctgtcctttctcatcccatctttgacaatcgtgcccccaacactgccgagctcaagatctgccgagtgaaccgaaactctggcagctgcctcggtggggatgagatcttcctactgtgtgacaaggtgcagaaagaggacattgaggtgtatttcacgggaccaggctgggaggcccgaggctccttttcgcaagctgatgtgcaccgacaagtggccattgtgttccggacccctccctacgcagaccccagcctgcaggctcctgtgcgtgtctccatgcagctgcggcggccttccgaccgggagctcagtgagcccatggaattccagtacctgccagatacagacgatcgtcaccggattgaggagaaacgtaaaaggacatatgagaccttcaagagcatcatgaagaagagtcctttcagcggacccaccgacccccggcctccacctcgacgcattgctgtgccttcccgcagctcagcttctgtccccaagccagcaccccagccctatccctttacgtcatccctgagcaccatcaactatgatgagtttcccaccatggtgtttccttctgggcagatcagccaggcctcggccttggccccggcccctccccaagtcctgccccaggctccagcccctgcccctgctccagccatggtatcagctctggcccaggccccagcccctgtcccagtcctagccccaggccctcctcaggctgtggccccacctgcccccaagcccacccaggctggggaaggaacgctgtcagaggccctgctgcagctgcagtttgatgatgaagacctgggggccttgcttggcaacagcacagacccagctgtgttcacagacctggcatccgtcgacaactccgagtttcagcagctgctgaaccagggcatacctgtggccccccacacaactgagcccatgctgatggagtaccctgaggctataactcgcctagtgacagcccagaggccccccgacccagctcctgctccactgggggccccggggctccccaatggcctcctttcaggagatgaagacttctcctccattgcggacatggacttctcagccctgctgagtcagatcagctcctaagggggtgacgcctgccctccccagagcactggttgcaggggattgaagccctccaaaagcacttacggattctggtggggtgtgttccaactgcccccaactttgtggatgtcttccttggaggggggagccatattttattcttttattgtcagtatctgtatctctctctctttttggaggtgcttaagcagaagcattaacttctctggaaaggggggagctggggaaactcaaacttttcccctgtcctgatggtcagctcccttctctgtagggaactgtggggtcccccatccccatcctccagcttctggtactctcctagagacagaagcaggctggaggtaaggcctttgagcccacaaagccttatcaagtgtcttccatcatggattcattacagcttaatcaaaataacgccccagataccagcccctgtatggcactggcattgtccctgtgcctaacaccagcgtttgaggggctgccttcctgccctacagaggtctctgccggctctttccttgctcaaccatggctgaaggaaacagtgcaacagcactggctctctccaggatccagaaggggtttggtctggacttccttgctctcccctcttctcaagtgccttaatagtagggtaagttgttaagagtgggggagagcaggctggcagctctccagtcaggaggcatagtttttagtgaacaatcaaagcacttggactcttgctctttctactctgaactaataaagctgttgccaagctggacggcacgagctcgtgcc

SEQ ID NO: 6 - DNA, 3935 bp, Homo sapiens
  misc_feature (508)..(508): n is a, c, g, or t
  misc_feature (620)..(620): n is a, c, g, or t
  misc_feature (1611)..(1613): n is a, c, g, or t
  misc_feature (1616)..(1618): n is a, c, g, or t
  misc_feature (1621)..(1621): n is a, c, g, or t
  misc_feature (2350)..(2350): n is a, c, g, or t
  misc_feature (2584)..(2584): n is a, c, g, or t
  misc_feature (2756)..(2757): n is a, c, g, or t
  misc_feature (2759)..(2759): n is a, c, g, or t
  misc_feature (2790)..(2790): n is a, c, g, or t
gggagcccttctattggaaagaaagggaagggacacctggtctttaaaagcgaccatttaaggttcttttctgaatattggcccaatcctcatatggacgccgaccacctgtaaatcccatgggcctaacagagagaatttttttttttttaatgtgaagaggattaaagaataaagaaaaaacaaaaaagtcttatactaaaataagaaatcagccccatcttggcacagttctcatgcagaatattgcacccagtgtgaactaacgctagaagcttcaaactgtataaatttaaatgtatttgcatattataaaaataaagataaacatatacatattttacactagttatggaacagcaatgaacgtcagtcgatccctctttcacatttaacagaactgaaatctgagtgctctaaatactgccacctgtactgtaactatggcttatatgtgcacggaaaacaaaatccctgagaagccattcgacttttttttttttttttncttttcttcaagtagcgcgctccttggaggatcacagttctgaggttcaggttgtaaaacatttgctccatgttctcgtccatgcttccccccaccaccccctccccacctnttccccagtcatccaaaaagcaccctgcaagcacgcgttgtcactcaagttcacagaacacgctggggtgagtgcagagggtctgccaggtgcaaaagatggtccaggtgttcagatgctctcttttctccatggaaattccacagccacaaacgtcactggtttctgtgcttttcaccaacattcttcttggaacaggggctgatcacagtcggcgtgggtgggtaaaccaaggcaacatttactcgctcgctgccgttcttggggcaaatgatctctgccactccttccggtctgggctgactcagcaactcccctggaaaagcatgtggattgggcgatcctctcttaaggcacttagaacagagaatgtgcacggtgtagtgcagtccaggccattcctgaagtaggacattcagttcctccaccaagggggttatggcttgccatgcggtccatatatttggtaatgatgcatggctagcaatggacagggtgtctggctgcaggactcccctggcaggtctgtaactcacaaccacaggaactttccctctataggcaaagatctgaaatttaccatccgacctgtgcaccacatggctgttgatctggacactgtagcgtgcaaacaacccaggtggaaaagtaaaaggaaagctatattcaatctgcaactgctcagccacaaaagactgcccagctaggttggtcccattaatccaggcttctgcatggggcacctcgttctgcacatagcatgggaacttgtaccaagctgtggacccattcaaaggcttgcccttgggtttattgaggcagtaacagagtcccatcttctccagcagctccagcaacagctgcaagtcctgctgggcctggacatgaggcttaagcagcaaccgaatgacatgagctggcaagagcccatgcaacagaaagccctccacatactgatggagctgggtggcccggagcagttcctggctgnnngtnnnccncgccatgggcggggagctttccccctccgccttgccctctccactggtccctaggagcagcttatgcagcagcaaagagggatccctctggaagaagacattgaggatgtcgatgaggcgggtgaggttgtggaagacgtgctccttgagagccggactgtcctcaaagtagagtagcttgccgctctcatgcaggtaggagagggcactctgcagtcggtcctcggtcagacccgcctgcaggcccaagcgcgccgagtcccaccagcttagccacagtcgctgggcctgaggtggctggaaatgcagttcctccagcacctgccaggatcgaggcagtactctgtgtaagttggggaagatctctcggtgctcagcaactgacagcaacttgtcccgaaggcgtcgtaagtggcgcgggtccctgcagctaacaggcaacacgggggagaggatctgcagccggtggttgagcaggtattgaaaatgggccttgcgccgtcgaaggttcttgtccgaaacgccatagtaggctgcgtgggggctggcagagcgcagctcgaagtcccgggccagtgcctcgtccaccaccttggccaagcggctcagtccctccgcgtcgtgcttctcctgcagggcgatctggcggtgaatgtccagacatttctcctccagctcacgctctccgcacaggtctgcgtgggtgcccacgatgcacaccaccgcgtngggcactctcgccccgacccgatgcaagaaggagcccacggtggtaggaaagtggcgaggctcataggtggccaagttgaccaccagcacgtatagggcccctggggacaggaagaagggctggatcacctcataactttcatccccagctaagtcatacacgatgaaccgcaggccccgggaggcatcggccgtccagctggtcacctcgatgcccttgctcacagggggagntgacggtgggtagcacttctccttgtcccctcctcctgggcatccctccactctctcctcggtgaggcagtggcgcagcaaagtctttcctgcagccttatgccccatcaggagcagcttgagccggggctgcaccgccggctgggaatgagccagttccttctggtaggcnncngatgtaggggatccccttcatgcagacctcntaggggggctggatcagtgggttgtctttgatcttccacaaacccacccgggagagctggccaaagtggtcgggcagcaccgcgatctggttcccctgcagcacgagctcctccaggccggtcagctccacgatggagtccggcaggtagcggatgcggttattatccagccacaaggtgagaagccggcccaggcccgagataagggatggcaccgaggtgagctggttgcgactaaggtagagctcctccagaccagccaggggcagcagcgcggcagggaactcctcgaagaggttggaggacaggttgagcattttgagccgctgcaggcagctgaactgggcgggcagagcctgcagcccgttgttgtctagcatgaggctctccaaactggccagctcgcagaagccggcgggcagcgtgccaagctcggccccactcagccagaggatcttgagggcacgcagggcactgatatcctcaggcaggccccgcagccggttgctggacacgtccagctcctccagggccaccagctgcagcagctgccgggggaaggcagtgagctggttgtgatccacgtccagggtgcgcaggcgggagaggcaggagagggagtcaggcaggtgcgccagccggttaaagctgacatccagctcctccaggtgagcgagagcgcccagctgggcgggcagggcgggcagctggttgtggctgaggttgagcttccgcagctccctcagagcactcaccacctccgcgcccagggcggtcagccggttgtggctcacgtccagctcggtgaggtggtggccgagctcggccaccgccgggggcagccgggcgaagcggttcctgcgcaggaccaggacgcgcaggctgcccagcgccgaccccagcccctcgggtacctcctccaggccgttgttccccaggttcagtgcctcaatgtccccgaggttggccggcagcacgagctggggggaggcgggggactcgagcgcgtcggccccggccccggggcaggccccggcggcggtgagcgtgagctggcgcaggttgctccgcagcttcctggcacgcagggcggcgtcccgccacagcctcgcggtcttcaggttgccactgtccatcccagccat

SEQ ID NO: 7 - DNA, 3791 bp, Homo sapiens
acagacggcgggtgaacatggcgtcctcgacttggtctgagacgtgataggcctgccttctggttgaagatgtggcgagtgaaaaaactgagcctcagcctgtcgccttcgccccagacgggaaaaccatctatgagaactcctctccgtgaacttaccctgcagcccggtgccctcaccacctctggaaaaagatcccccgcttgctcctcgctgaccccatcactgtgcaagctggggctgcaggaaggcagcaacaactcgtctccagtggattttgtaaataacaagaggacagacttatcttcagaacatttcagtcattcctcaaagtggctagaaacttgtcagcatgaatcagatgagcagcctctagatccaattccccaaattagctctactcctaaaacgtctgaggaagcagtagacccactgggcaattatatggttaaaaccatcgtccttgtaccatctccactggggcagcaacaagacatgatatttgaggcccgtttagataccatggcagagacaaacagcatatctttaaatggacctttgagaacagacgatctggtgagagaggaggtggcaccctgcatgggagacaggttttcagaagttgctgctgtatctgagaaacctatctttcaggaatctccgtcccatctcttagaggagtctccaccaaatccctgttctgaacaactacattgctccaaggaaagcctgagcagtagaactgaggctgtgcgtgaggacttagtaccttctgaaagtaacgccttcttgccttcctctgttctctggctttccccttcaactgccttggcagcagatttccgtgtcaatcatgtggacccagaggaggaaattgtagagcatggagctatggaggaaagagaaatgaggtttcccacacatcctaaggagtctgaaacagaagatcaagcacttgtctcaagtgtggaagatattctgtccacatgcctgacaccaaatctagtagaaatggaatcccaagaagctccaggcccagcagtagaagatgttggtaggattcttggctctgatacagagtcttggatgtccccactggcctggctggaaaaaggtgtaaatacctccgtcatgctggaaaatctccgccaaagcttatcccttccctcgatgcttcgggatgctgcaattggcactacccctttctctacttgctcggtggggacttggtttactccttcagcaccacaggaaaagagtacaaacacatcccagacaggcctggttggcaccaagcacagtacttctgagacagagcagctcctgtgtggccggcctccagatctgactgccttgtctcgacatgacttggaagataacctgctgagctctcttgtcattgtggagtttctctcccgccagcttcgggactggaagagccagctggctgtccctcacccagaaacccaggacagtagcacacagactgacacatctcacagtgggataactaataaacttcagcatcttaaggagagccatgagatgggacaggccctacagcaggccagaaatgtcatgcaatcatgggtgcttatctctaaagagctgatatccttgcttcacctatccctgttgcatttagaagaagataagactactgtgaatcaggagtctcggcgtgcagaaacattggtctgttgctgttttgatttgctgaagaaattgagggcaaagctccagagcctcaaagcagaaagggaggaggcaaggcacagagaggaaatggctctcagaggcaaggatgcggcagagatagtgttggaggctttctgtgcacacgccagccagcgcatcagccagctggaacaggacctagcatccatgcgggaattcagaggccttctgaaggatgcccagacccaactggtagggcttcatgccaagcaagaagagctggttcagcagacagtgagtcttacttctaccttgcaacaagactggaggtccatgcaactggattatacaacatggacagctttgctgagtcggtcccgacaactcacagagaaactcacagtcaagagccagcaagccctgcaggaacgtgatgtggcaattgaggaaaagcaggaggtttctagggtgctggaacaagtctctgcccagttagaggagtgcaaaggccaaacagaacaactggagttggaaaacattcgtctagcaacagatctccgggctcagttgcagattctggccaacatggacagccagctaaaagagctacagagtcagcatacccattgtgcccaggacctggctatgaaggatgagttactctgccagcttacccagagcaatgaggagcaggctgctcaatgcgtaaaggaagagatggcactaaaacacatgcaggcagaactgcagcagcaacaagctgtcctggccaaagaggtgcgggacctgaaagagaccttggagtttgcagaccaggagaatcaggttgctcacctggagctgggtcaggttgagtgtcaattgaaaaccacactggaagtgctccgggagcgcagcttgcagtgtgagaacctcaaggacactgtagagaacctaacggctaaactggccagcaccatagcagataaccaggagcaagatctggagaaaacacggcagtactctcaaaagctagggctgctgactgagcaactacagagcctgactctctttctacagacaaaactaaaggagaagactgaacaagagacccttctgctgagtacagcctgtcctcccacccaggaacaccctctgcctaatgacaggaccttcctgggaagcatcttgacagcagtggcagatgaagagccagaatcaactcctgtgcccttgcttggaagtgacaagagtgctttcacccgagtagcatcaatggtttcccttcagcccgcagagaccccaggcatggaggagagcctggcagaaatgagtattatgactactgagcttcagagtctttgttccctgctacaagagtctaaagaagaagccatcaggactctgcagcgaaaaatttgtgagctgcaagctaggctgcaggcccaggaagaacagcatcaggaagtccagaaggcaaaagaagcagacatagagaagctgaaccaggccttgtgcttgcgctacaagaatgaaaaggagctccaggaagtgatacagcagaatgagaagatcctagaacagatagacaagagtggcgagctcataagccttagagaggaggtgacccaccttacccgctcacttcggcgtgcggagacagagaccaaagtgctccaggaggcctggcaggccagctggactccaactgccagcctatggccaccaattggatccaggagaaagtgtggctctctcaggaggtggacaaactgagagtgatgttcctggagatgaaaaatgagaaggaaaactcctgatcaagttccagagcccatagaaatatcctagaggagaaccttcggcgctctgacaaggagttagaaaaactagatgacattgttcagcatatttataagaccctgctctctattccagaggtggtgaggggatgcaaagaactacagggattgctggaatttctgagctaagaaactgaaagccagaatttgtttcacctctttttacctgcaatacccccttaccccaataccaagaccaactggcatagagccaactgagataaatgctatttaaataaagtgtatttaatgaaaaaaaaaaaaaaaaaaaaa

SEQ ID NO: 8 - DNA, 586 bp, Homo sapiens
gcatgatcctgaagcccaacttccacaaggactggcagtggtgtggccatgtggctcagccagcccatggggcagacctgcagaagcaaggtggccagcaaaagcaggctgcatggcccactgatatgggcccatccacccatagtaaggtgccccatgctgaggcatcactacaaagcacaagctggcaggggcctcagcttggaggagttaagggtggctggcatttacaagaaggtggcccagaccattggcatctctgaggatgcaaggaggaggaaccagtccacccaggccctgcaggccaaggtgcagaggctgaaggaggaccgctcctcactcatcctcttccccaggaagcccttggcccccaagaagggagacagttctgctgaagaactcgaactggatactcagctgacaggaccagaaatgcccatcggcaatgtctacaaggagaaagccagagtcatcactgagtaggaggaaaacttccaggccttgttagtctctgtatggcccatgcaaatgcccagctcttcggcatataggcacaaagagccaaggaagctgtagaagaggacgc

SEQ ID NO: 9 - DNA, 2356 bp, Homo sapiens
atttaaatggttcaattgatggcattcgccacatgtttacccctaagcttgaaataatgctggagcccaaggtctggagagaagctgctactcaagtgttctttgccttaggtctgggatttggtggtgtcattgccttttcaagctacaacaagagagacaacaactgccactttgatgctgtcctggtgtccttcatcaattttttcacttctgtcctggcaacattggtggtgtttgcagttctgggcttcaaagcaaatgtcataaatgagaaatgcattacacaaaattcagagacgatcatgaaatttttgaaaatggggaacattagtcaggatattattccccatcatatcaacctttcaactgttactgtagaagactatcatttagtttatgacatcattcaaaaagtgaaagaagaagagtttcctgctcttcatctcaattcctgtaaaattgaagaagagctaaataaagctgttcaggggaccggcttagcttttattgcctttacagaagcgatgacacattttcctgcatctcccttctggtcagtgatgtttttcctcatgctggtcaatctaggccttggcagtatgtttggaaccattgaagggattgtcacgcctattgtggacactttcaaagtgaggaaagaaattcttactgttatctgttgtcttctggcattttgtattggcctgatattgtgcaacgctctggaaattactttgttacaatgtttgatgattattctgctacactgcctctgctaattgtagtcattttggagaatattgctgtatgctttgtttatggcatagataagtttatggaagacctaaaagatatgctgggctttgctcccagcagatattactactatatgtggaaatatatttctcctctaatgctattatcattgctaatagctagtgttgtgaatatgggattaagtcctcctggctataacgcatggattgaagataaggcatctgaagaatttctgagctatccaacatggggactggttgtttgtgtctctctggttgtctttgcaatactcccagtccctgtagttttcattgttcgtcgcttcaaccttatagatgatagttctggtaatttagcatctgtgacctataagagaggaagggtcctgaaagagcctgtgaacttagagggcgatgatacaagcctcattcacggaaaaataccgagcgagatgccatctccaaattttggtaaaaatatttatcgaaaacagagtggatccccaactctggatactgctcccaatggacggtatggaatagggtacttgatggcagatattatgccagatatgccagaatctgatttgtagctgggggaaaagtcagtgggttttatttggttcatttttaccaatgaacattggccctagtaggagaagcattaggcttcacttatcagagggcaatctcaggtgttccgtggctgtgatctttaatcctaacagtatatgtcagttcaacttgagcattcttttggattctttggtttacatttgtgcagaaaggattgcagacaaatcttaggagggctgaggtacatgtttgccaggatttttttttaagtacctttggtgtattttcaaatatttctatctcttaaaaaaatggtattacctcagtttctaataatttctgggtttagtagtgttgacaattaaaaatggtatacattaaaatttataagtttgccttcagggtaacttccagtgtcacaatgagcagttctgtaagtgggtgcctctcagcacatttctatgaatatattatgtagataggctgtattgattttggtagcattgacaccttcttaggcaattagttgaagaaaactgcaaaatattttcttatgtaatagctgtatagagcaatagcaatcaaagcatgagaaggcactaacgctgggatgaaagatgagattcagaggtgactgagaatcatgtgagtgatggctgtatattttgtgtaaaatatatgtgtgaaaatgaactaagagtgagttactcagcactctcaagaattatgcagattctgcatttttcttatgccgtgtgcctaaaaacctacttgatatttattgtggtttcaagattattcatagtatatttatacaatatacttgcaatgcatttaagtacttaaagtactaatttgaaaacttgaagcaagatggcattttaattaatatatttctgttttgcttctgttttatgcaaatataaatcatttttaagtgattgttaaaattgtaatgcattacattttaatctacaaataaacaaagtttaaaaatgaat

SEQ ID NO: 10 - DNA, 1612 bp, Homo sapiens
ctctcctgccccaccccgaggtaaagggggcgactaagagaagatggtgttgctcaccgcggtcctcctgctgctggccgcctatgcggggccggcccagagcctgggctccttcgtgcactgcgagccctgcgacgagaaagccctctccatgtgcccccccagccccctgggctgcgagctggtcaaggagccgggctgcggctgctgcatgacctgcgccctggccgaggggcagtcgtgcggcgtctacaccgagcgctgcgcccaggggctgcgctgcctcccccggcaggacgaggagaagccgctgcacgccctgctgcacggccgcggggtttgcctcaacgaaaagagctaccgcgagcaagtcaagatcgagagagactcccgtgagcacgaggagcccaccacctctgagatggccgaggagacctactcccccaagatcttccggcccaaacacacccgcatctccgagctgaaggctgaagcagtgaagaaggaccgcagaaagaagctgacccagtccaagtttgtcgggggagccgagaacactgcccacccccggatcatctctgcacctgagatgagacaggagtctgagcagggcccctgccgcagacacatggaggcttccctgcaggagctcaaagccagcccacgcatggtgccccgtgctgtgtacctgcccaattgtgaccgcaaaggattctacaagagaaagcagtgcaaaccttcccgtggccgcaagcgtggcatctgctggtgcgtggacaagtacgggatgaagctgccaggcatggagtacgttgacggggactttcagtgccacaccttcgacagcagcaacgttgagtgatgcgtccccccccaacctttccctcaccccctcccacccccagccccgactccagccagcgcctccctccaccccaggacgccactcatttcatctcatttaagggaaaaatatatatctatctatttgaggaaactgaggacctcggaatctctagcaagggctcaacttcgaaaatggcaacaacagagatgcaaaaagctaaaaagacaccccccccctttaaatggttttctttttgaggcaagttggatgaacagagaagggaagagaggaagaacgagaggaagagaagggaaggaagtgtttgtgtagaagagagagaaagacgaatagagttaggaaaaggaagacaagcaggtgggcaggaaggacatgcaccgagaccaggcaggggcccaactttcacgtccagccctggcctggggtcgggagaggtgggcgctagaagatgcagcccaggatgtggcaatcaatgacactattggggtttcccaggatggattggtcagggggagaaaggaaaaggcaaaacactccaggacctctcccggatctgtctcctcctctagccagcagtatggacagctggacccctgaacttcctctcctcttacctgggcagagtgttgtctctccccaaatttataaaaactaaaatgcattccattcctctgaaagcaaaacaaattcataattgagtgatattaaatagagaggttttcggaagcagatctgtgaatatgaaat

SEQ ID NO: 11 - DNA, 4417 bp, Homo sapiens
gccttcgcctgctggaaaagcagtaggatcggccagtggcgacagcaggagctgagcctaagccctggcggggctttgggctgtagattcctgtctgactaaagggacctcaaaaaggagggaaaatggcttctgagtctgaaactctgaatcccagtgctaggataatgaccttttatccaactatggaagagttccgaaacttcagtagatacattgcctacattgaatcccaaggagctcatcgggcagggctagccaaggttgttcctccaaaagagtggaagccacgagcatcctatgatgacattgatgatttggtcattcctgcccccattcaacagctggtgacggggcagtctggcctctttactcagtacaacatacagaagaaagccatgactgttcgagagttccgcaagatagccaatagcgataagtactgtaccccacgctatagtgagtttgaagagctcgagcggaaatactggaaaaatcttacattcaatcctccaatctatggtgcagatgtgaatggtaccctctatgaaaagcatgttgatgagtggaatattggccggctgagaacaatcctggacttggtggaaaaggagagtgggatcaccattgagggtgtgaacaccccatacctgtactttggcatgtggaagacatcctttgcttggcacactgaagacatggacctctacagcatcaactacctgcactttggagaaccaaagtcctggtactctgttccacctgagcatggaaagcggttggaacgcctcgccaaaggctttttcccaggaagtgctcaaagctgtgaggcatttctccgccacaagatgaccctgatttccccgttaatgctgaagaaatatggaattccctttgacaaggtgactcaagaggctggagagtttatgatcactttcccttatggttaccatgccggctttaaccatggttttaactgtgcggagtctaccaattttgctacccgtcggtggattgagtacggcaagcaagctgtgctgtgctcctgtagaaaggacatggtgaagatctccatggatgtgtttgtgagaaagttccagccagaaaggtacaaactttggaaagctgggaaggacaacacagttattgaccatactctgcccacgccagaagcagctgagtttcttaaggagagtgaactgcctccaagagctggcaacgaggaggagtgcccagaggaggacatggaaggggtggaggatggagaggaaggagacctgaagacaagcctggccaagcaccgaatagggacaaagaggcaccgagtttgtcttgaaataccacaggaggtgagtcagagtgagctcttccccaaggaggatctgagttctgagcagtatgagatgacggagtgcccggcagccctcgcccctgtgaggcccacccatagctctgtgcggcaagttgaggatggtcttaccttcccagattattctgactccactgaagtcaaatttgaagagcttaaaaatgtcaaactagaagaggaggatgaggaggaagaacaagaagcagctgccttggatctttctgtgaatcctgcgtctgtagggggacgccttgtcttctcaggctccaaaaagaaatcatcttctagcctgggctctggctcttcacgggattctatctcttctgattcagaaactagtgagcctctctcctgccgagcccaagggcaaacgggagttctcactgtgcacagttatgccaaaggggatggcagggtcactgtgggagagccatgcacgaggaagaaaggaagcgccgctagaagtttcagtgagcgggagctggcagaggttgcagatgaatacatgttttccctagaagagaataagaagtccaagggacgccgtcagcctttaagcaagctcccccgccatcacccacttgtgctgcaggagtgtgtcagtgatgatgagacatctgaacagctgacccctgaggaagaggctgaggagacagaggcctgggccaagcctctgagccaactgtggcagaaccgacctccaaactttgaggctgagaaggaattcaatgagaccatggcccaacaggcccctcactgcgctgtctgtatgatcttccagacttatcatcaggttgaatttggaggctttaatcagaactgtggaaatgcttcagatttagccccccagaagcagaggaccaagccattgattccagaaatgtgcttcacttcgactggctgcagcacggacatcaacctttctactccttatcttgaggaggatggcaccagcatactcgtttcctgcaagaagtgcagcgtccgggtccatgccagttgctatggggtcccccctgcaaaggcttctgaagactggatgtgttctcggtgttcagccaatgccctagaggaggactgctgtttatgctcattacgaggaggggccctgcagagagcaaatgatgacaggtgggtccacgtttcatgtgctgtggcaattctggaagcaaggtttgtcaacattgcagaaagaagtccggtggatgtgagcaaaatccccctgccccgcttcaaactgaaatgtatcttctgtaagaagcggaggaaaagaactgctggctgctgtgtgcagtgttctcacggccgctgcccaactgccttccatgtgagctgcgcccaggctgccggtgtgatgatgcagcctgacgactggccttttgtggtcttcattacctgctttcggcacaagattcctaatttggagcgtgccaagggggccttgcaaagcatcactgcaggccagaaagtcattagcaagcataagaacgggcgcttctaccagtgtgaagtggtcaggctcaccaccgagaccttctatgaagtcaactttgatgatggctccttcagcgacaatctttatcctgaggacatagtgagccaggactgtctccagtttggtcctcctgctgaaggggaagtggtccaagtgagatggacagacggccaagtctatggagccaagtttgtggcctcccaccctatccaaatgtaccaggtggagtttgaggatggctcacaacttgtggttaagagagatgatgtatacacactggatgaagagcttcccaagagagtcaaatctagactgtcagtagcctcagacatgcgcttcaatgagattttcacagagaaagaggttaagcaagaaaagaaacggcaacgagttatcaactcaagataccgggaagattatattgagcctgcactataccgggccatcatggagtaggtgcttccagggtccaagggattctcagccatccaggcaagagcactctgggttccacagcacagcagacatggaacgctgaagtctctgaaagtgaagttgtaaaaagaaaaggaatgaaataaccgacccatcatcttctcacccaccctcattgcattccgctgtagtgaaaggacgagccatttctgggcacgtggcagcagtcgctgatctcccagctgaggggctgagcactggaatgctgtggctgcactggccccagtccatagaggggtcaactatgctggctggactggctgccttgttcctggcctaggacttagcttcataactatcacctgcaccgactaggctgaggtgctggtacttgccccaacccctacttttgtatttatatgtgtgtgtgtgtgtgcgtgcgtgcgtgcgtgcgtgtatgtttggtctggaccagcttctgccagcccctggcctttactttcttccttgcctatgcagggcaaacaaaatgtgaaattctgccctcagctgagctgagtaagggctcctgggggttggctggagatgggtgtggcatctgtccaggcctggaaccgtctcaagacagtgctggcaaagctgcagtattgagatgctaaggagctgatgccacctctttgtcttcccctaaaggagaacatggggataacatgggtgtgtgcccacaacactctaggtgcagagcccctgtggcaaagtattacagggtgtgggtggggattaccctgaatcggggattttaatgatggaagcaggcagagcctggtgggtgattctgtcaacagaaaattgcaatcatgcaggggctgggagggttaggatgaaaaaactggggccattggaggcccactgtaggtgggagggagctgattttggggtggggggtgggactagagggcaatactgaaggggttaaacaggtttttgctcctcaagaatttgtttgcctgggcccaggattggagggcttcacaccaataccctgtgtatacaagaatcagatttataatacttccccttttttgttacgtatgaacactataaaccaaattattttg

SEQ ID NO: 12 - DNA, 1321 bp, Homo sapiens
ggccgcgcaccaaggctgcgatggggctggagacggagaaggcggacgtacagctcttcatggacgacgactcctacagccaccacagcggcctcgagtacgccgaccccgagaagttcgcggactcggaccaggaccgggatccccaccggctcaactcgcatctcaagctgggcttcgaggatgtgatcgcagagccggtgactacgcactcctttgacaaagtgtggatctgcagccatgccctctttgaaatcagcaaatacgtaatgtacaagttcctgacggtgttcctggccattcccctggccttcattgcgggaattctctttgccaccctcagctgtctgcacatctggattttaatgccttttgtaaagacctgcctaatggttctgccttcagtgcagacaatatggaagagtgtgacagatgttatcattgctccattgtgtacgagcgtaggacgatgcttctcttctgtcagcctgcaactgagccaggattgaatacttggaccccaggtctggagattgggatactgtaatacttctttgttattataacataaaagcaccactgttctgttcatttcctagctgttctaattaagaaaactattaagatgagcaaccacatttagaaatgtttattgacaggtcttttcaaataatgcttttctaattaatagccaaagatttcatatctaactttgtaaccagaattatacagtaagttgacaccacttagatttaaaggcagacagttttgctttagtacaatagtatacattttataatgatgaacttataatgattaagggacatttctataaaaatactacaatagttttatgcacaacttcccattaaaaatgagatttcttatttgtttgtctgtttttactctgggagtaatactttttaaattacctttacatatatagtcactggcatactgagaatatacaatgatcctggaaattgcagtaccaaaagcacacaacgattatagtaactataagatacaataaaccaaataaatgtgaaagtagattcatgaaaatgtattcctttaaaatattgttttcctacaggcctatttaacaagatgtttcattttctgtatattttgtagttaatataaatgttgctctaatcagattgcttaaaagcatttttattatatttatgttgttgaactaatatatgaaataagtaaatgtagctcccacaaggtaaacttcattggtaagattgcactgttctgattatgtaagcatttgtacatcttctttggaaataaaagataaaagagcgat

SEQ ID NO: 13 - DNA, 619 bp, Homo sapiens
ccacgcgtccggggaccggggccatgtctccacacctcactgctctcctgggcctagtgctctgcctggcccagaccatccacacgcaggagggggcccttcccagaccctccatctcggctgagccaggcactgtgatctccccggggagccatgtgactttcatgtgccggggcccggttggggttcaaacattccgcctggagagggaggatagagccaagtacaaagatagttataatgtgtttcgacttggtccatctgagtcagaggccagattccacattgactcagtaagtgaaggaaatgccgggctttatcgctgcctctattataagccccctggatggtctgagcacagtgacttcctggagctgctggtgaaagaaagctctggaggcccggactccccggacacagagcccggctcctcagctgggactgtgccaggcactgaagcctccggatttgatgcaccatgaatgaggagaaatggcctcccgtcttgtgaacttcaatggggagaaataattagaatgagcaatagaaatgcacagatgcctatacatacatatacaaataaaaagatacgattcgcaaaaaaaaaaaaaaaaagggc

SEQ ID NO: 14 - DNA, 186 bp, Homo sapiens
atggaccccaactgctcctgcgccgctggtgtctcctgcacctgcgctggttcctgcaagtgcaaagagtgcaaatgcacctcctgcaagaagagctgctgctcctgctgccccgtgggctgtagcaagtgtgcccagggctgtgtttgcaaaggggcgtcagagaagtgcagctgctgcgactga

SEQ ID NO: 15 - DNA, 4412 bp, Homo sapiens
  misc_feature (887)..(889): n is a, c, g, or t
  misc_feature (891)..(895): n is a, c, g, or t
  misc_feature (910)..(910): n is a, c, g, or t
  misc_feature (1551)..(1551): n is a, c, g, or t
  misc_feature (1687)..(1687): n is a, c, g, or t
  misc_feature (1689)..(1689): n is a, c, g, or t
  misc_feature (1718)..(1718): n is a, c, g, or t
  misc_feature (2595)..(2595): n is a, c, g, or t
  misc_feature (2603)..(2603): n is a, c, g, or t
  misc_feature (2720)..(2720): n is a, c, g, or t
  misc_feature (2896)..(2897): n is a, c, g, or t
  misc_feature (3542)..(3543): n is a, c, g, or t
  misc_feature (3545)..(3547): n is a, c, g, or t
  misc_feature (3549)..(3551): n is a, c, g, or t
  misc_feature (3553)..(3557): n is a, c, g, or t
  misc_feature (3559)..(3559): n is a, c, g, or t
  misc_feature (3562)..(3567): n is a, c, g, or t
  misc_feature (3576)..(3576): n is a, c, g, or t
  misc_feature (3707)..(3712): n is a, c, g, or t
gaggaggagctggagggggcgcggcttcctctcggtcgctccctggcgccgggcctctttctctgcctggcccagggctggcggccggcgggggtcgcggcggcggcagtgggggcgctggcgggccgcgggtggcgggggccgggccgcggctccgggtgttaggagacaagatggcggcggctctcagaaggccggtctcctcctctccgccgtcctccgccccgccgctcgccgcctcctcctctcgggtctcctcctcctcgtttgctgcctcctcctcctcctgcagcagcaccagcgaccgccgaagcgccggctcgctcacccggagctccggaggtggatagacggggcagctgcaggctccggcgaccgaggccgagctggggccggggcggggacggcggcggcggcggcggcgacggcggcggcgccgggtggggatggggtcgcagacgctgcagatcctccgacagggggtgtgggccgcgctcagcgggggctggtactacgacccgcaccaggccaccttcgtgaacgcgctgcacctctacctgtggctcttctgctgggcctacccttcaccctctacatggcccttccttctaccatgattatagtagcagtttattgtcctgtgatagctgctgttttcattgttctgaagatggtcaactatcgactacacagagcacttgatgctggagaagttgtagataggactgcaaatgagttcacggatcagcgaaccaaagctgaacaaggcaactgttcaaccaggagaaaagacagcaatggaccgagtgatcctggtggagggattgaaatgtctgagttcatccgagaggccacacccccagttggttgcagttccagaaattctnnngnnnnnctagatccaagcaancagattggatctggttcctcgcgtcttggaacagcagcaactattaaaggagatacagacactgctaagacttctgatgatatcagtttaagtctgggccaaagttctagtctttgtaaggaaggaagtgaagaacaagatttggcagctgatcggaagctctttcgtcttgtctccaatgactccttcatctctattcagccttccttatcctcttgtggacaggacttgccaagggacttcagtgacaaagtgaacctgccaagtcataaccaccaccaccatgttgatcagtctctgtccagcgcctgtgacacagaagtagcttctcttgtacctttacactcacactcttatagaaaagaccaccggccgcgaggtgtaccacggacttctagctctgctgtggcttttccagacacttcactgaatgattttcccctttatcagcaaagacgtggattagatccagttagtgagttagaatcttccaagcctctttctggatccaaagaatccttggtggaaaattctggtttatctggggaatttcagcttgctggtgacttgaaaatcaatacttctcagccacccacaaaaagtgggaagagcaaacctttgaaagcagagaaaagcatggncagcttgaggagcctgagcacacggagtagtgggtcaacagaaagctactgcagtggaacggaccgggacactaacagtactgtcagcagctataaaagtgagcagaccagctcaactcacatagagagcatcctntncagagcatgaggagtctcctaaagcaggnacaaaaagtgggaggaagaaagagtgctgtgcaggcccagaggagaagaatagctgtgccagtgacaaaaggactagcagtgaaaagattgctatggaagcgagtaccaacagtggggttcacgaggccaaggaccccaccccctctgatgagatgcacaaccagagaggtctcagcacctctgcatctgaagaagccaataaaaatccccatgcaaatgaatttacttcccaaggggacagaccacctgggaacactgcagaaaacaaagaagagaagagtgataagtcagctgtttctgtggattccaaagtgcgtaaagatgttggtggaaagcaaaaggaaggggatgttcgacctaaatcttctagcgtaatccatcggacagcttctgcccacaagtcaggcaggagacgcacaggaaaaaaacgggctagcagttttgattcaagccggcatagggactatgtttgctttcgaggtgtttctggtaccaagccacacagtgctatattttgtcatgacgaagactctagtgatcagagtgacttgagtagagcatcaagtgttcagtctgctcaccagttcagcagtgatagctcttctagcaccacttctcattcctgtcagtctcctgagggcagatacagtgctctaaagaccaaacacactcataaagaaaggggcacagactctgaacacacacacaaagctcatttggttcctgaaggaaccagcaaaaagcgtgcaacacgacggacttctagcacaaatagtgccaagactcgtgcccgagtgttgagcctggacagtggcacagtagcatgtttgaatgactcaaacaggttaatggcacctgaaagtataaagcccttanccacttcnaaatcagatcttgaggccaaagagggagaggtgctagatgagctatctttattaggacgggcttcccagttagagacagtcactcgatctaggaatagcttgccaaaccaggttgcntttcctgaaggggaagagcaagatgcagtcagtggagcagcacaagccagcgaggaggcagtgtcatttcgccgtgaacgcagcacatttaggcgccaggcagtacggcgccggcacaatgcagggagtaaccctacccctcctacattgctcatcggatcacccctaagccttcnngatggtcagcaaggccagcagtccacagcccaggtcaaagtccagtcccgccccccttcccaggctgcagtgctcagtgctagtgcctccttgctggtaagttctcttctacgctgtatgagactggtggctgtgatatgtcacttgtgaattttgaaccagcagcaagaagagcatccaatatctgtgacacagattctcatgtatccagttctacctcagttcgattttatccacatgatgtggtaggtttttctttatttttacaacatgataaattttcagattaaatctgaaatatgtatttacatagatagctataaaagccataaaaattgatgaagttacacaaaaattttttgaaaactatggcaaaatcactttgctgccctccagtggctctctttttctaagtcctttgataagaaacaaaagtacaaggttaagaaaccctggcatagagtattttaaaaagtgttttggaaagtatttgtcaatgcttagagatagaaatggctgtgttatatataggaagtaaattttctcaactatacccagatatgtgtttgaaaagtaaaaccctccctactttttggctatagtgtattcctggaaactgcataggaaagcaaacatgggaagatnntnnntnnntnnnnntntannnnnnaatggtatngggaaccttgagatagcaaaatgctgcctagtactatgccaaatacagtcaacttttgatgctttctgaggaaaagaaaactggtaaactgatggatggatgagttgaagttaaatatagtatagtaattnnnnnngcctcaggtgagcagcttgccaaaacaaacaaacaaacaaacaaacaggggtgagggatttggaaatatagtaacaacaatgataagagactgtgggaagaaatgagagttgctgccatcagatccaatgcagtggggctcagatttaacactgataatgaggttcaaagcttaaggagaaaagactataaatgtgagaagagaagccactaacgattcacagtaagtggttttagtagattcgctagctatacagttataaaatcttaaggttttttcttaagcattccctgagaaaaatcttaagattttagacacttttctagtcaattatttacaataggtttattgattaattaactttgttttagttcacttcctattgtcaccttctatagtttctggtaatcataacatattcataaagagtaggctgggcgcagtggctcctgcctgtaatcccagcactttgagaggccgaggcgggtggatcacgaggtcaagagttcaagaccagcctggccaagatggtaaaatcccgtctctacaaaaaatagaaaaagaattagccgggcatggtggcaggtgcctgtaatcccagctgcttgggaggctgaggcagagaattgcttgaaccggggaggcagaggttgcagtgagccgagattgcaccactgtacttcagacaagactctgtctc

SEQ ID NO: 16 - DNA, 357 bp, Homo sapiens
  misc_feature (63)..(63): n is a, c, g, or t
  misc_feature (65)..(65): n is a, c, g, or t
  misc_feature (68)..(68): n is a, c, g, or t
  misc_feature (72)..(72): n is a, c, g, or t
  misc_feature (125)..(125): n is a, c, g, or t
  misc_feature (188)..(188): n is a, c, g, or t
  misc_feature (201)..(201): n is a, c, g, or t
  misc_feature (227)..(227): n is a, c, g, or t
  misc_feature (254)..(254): n is a, c, g, or t
  misc_feature (317)..(317): n is a, c, g, or t
  misc_feature (323)..(323): n is a, c, g, or t
agagaagaggaagcggctgcagccccagcgccgaccagcagggggcacaggacagagaagagnangcngcancagccccagcgccgaccagcagggggcacaggacagagaagaggaagcggctncagctccagtgccaaccagcagggggcacaggacagagaagaggaagcggcagcagccccagngccgaccagcagngggcacaggacagagaagaggaagcngcagcagccccagcgccgaccagcagngggcacaggacagagaagaggaagcggcagcagccccagcgccgaccagcagcgggcacaggnacaganaagaggaagtgaggaaatggaagaagagggttga

SEQ ID NO: 17 - DNA, 798 bp, Homo sapiens
gcacgagagaagaggaagccgcagcagccccagcgccgaccagcagggggcacaggacagagaagaggaagcggctacagccccagcgccgaccagcagggggcacaggacagagaagaggaagccgcagcagccccagcgccgaccagcagcgggcacaggacagagaagaggaagcggctgcagctccagtgccaaccagcagggggcacaggacagagaagaggaagcggccaaggccccagtgcccgaccagcagctttcacaggacagagaagaggaagccgcagcagccccagcgccgaccagcagcgggcacaggacagagaagaggaagcggccaggccccagcgccgaccagcagcgggcacaggacagagaagaggaagcgcagcagccccagtgccgaccagcagcggcacaggacagagaagaggaagcgcagcagccccagcgccgaccagcagcggcacaggacagagaagaggaagtgaggaaatggaagaagagggttgacctgagctgaaggacatgaacttccacgtgaaatagccccagggccgggcacacgaggtcaggagttcaagaccagcctggccaagatggtgaaaccctgtctctactaaaaataaaaaattagctgggtgcggtggcaggcacctgtaatcccagctactcaggaggctgaggcaggagaatcacttgacccaggaggtggaggttacagtgagccagatctcaccactgcactgtagcctggcaacagagcaagactccatgaaaaaaaaaaaaaaaaaa

SEQ ID NO: 18 - DNA, 2019 bp, Homo sapiens
gaccttggcttgcccggggccatttcataattctgaatcatgtctgataacggagaactggaagataagcctccagcacctcctgtgcgaatgagcagcaccatctttagcactggaggcaaagaccctttgtcagccaatcacagtttgaaacctttgccctctgttccagaagagaaaaagcccaggcataaaatcatctccatattctcaggcacagagaaaggaagtaaaaagaaagaaaaggaacggccagaaatttctcctccatctgattttgagcacaccatccatgttggctttgatgctgttactggagaattcactggcatgccagaacagtgggctcgattactacagacctccaatatcaccaaactagagcaaaagaagaatcctcaggctgtgctggatgtcctaaagttctacgactccaacacagtgaagcagaaatatctgagctttactcctcctgagaaagatggccttccttctggaacgccagcactgaatgccaagggaacagaagcacccgcagtagtgacagaggaggaggatgatgatgaagagactgctcctcccgttattgccccgcgaccggatcatacgaaatcaatttacacacggtctgtaattgaccctgttcctgcaccagttggtgattcacatgttgatggtgctgccaagtctttagacaaacagaaaaagaagcctaagatgacagatgaagagattatggagaaattaagaactatcgtgagcataggtgaccctaagaaaaaatatacaagatatgaaaaaattggacaaggggcttctggtacagttttcactgctactgacgttgcactgggacaggaggttgctatcaaacaaattaatttacagaaacagccaaagaaggaactgatcattaacgagattctggtgatgaaagaattgaaaaatcccaacatcgttaactttttggacagttacctggtaggagatgaattgtttgtggtcatggaataccttgctggggggtcactcactgatgtggtaacagaaacagcttgcatggatgaagcacagattgctgctgtatgcagagagtgtttacaggcattggagtttttacatgctaatcaagtgatccacagagacatcaaaagtgacaatgtacttttgggaatggaaggatctgttaagctcactgactttggtttctgtgcccagatcacccctgagcagagcaaacgcagtaccatggtcggaacgccatactggatggcaccagaggtggttacacggaaagcttatggccctaaagtcgacatatggtctctgggtatcatggctattgagatggtagaaggagagcctccatacctcaatgaaaatcccttgagggccttgtacctaatagcaactaatggaaccccagaacttcagaatccagagaaactttccccaatatttcgggatttcttaaatcgatgtttggaaatggatgtggaaaaaaggggttcagccaaagaattattacagcatcctttcctgaaactggccaaaccgttatctagcttgacaccactgatcatggcagctaaagaagcaatgaagagtaaccgttaacatcactgctgtgggctcatactcttttttccattttctacaagaagccttttagtatatgaaaatgatgactctgttgggggtttaaagaaatggtctgcataacctgaatgaaagaaggaaatgactattctctgaagacaaccaagagaaaattggaaaagacaaggtatgactttgttatgaacccctgcttttaggggtccaggaagggatttgtgggacttgaattcactaggcttaggtctttcaggaaacaggctatcaggggcatttatcatgtgtgagattggattctacttgggtgatttggtggatagacccatgaatggcccctgggggttttcaatcttggattggaggtgggggtttcagagtgttgccacgtctagctcctctccc

SEQ ID NO: 19 - DNA, 2955 bp, Homo sapiens
cgcagcccgcggtcccgccgccccggggccggcacctctcgggctccggctccccgcgcgcaagatggctgacccggctgcggggccgccgccgagcgagggcgaggagagcaccgtgcgcttcgcccgcaaaggcgccctcaggcagaagaacgtgcatgaggtcaagaaccacaaattcaccgcccgcttcttcaagcagcccaccttctgcagccactgcaccgacttcatctggggcttcgggaagcagggattccagtgccaagtttgctgctttgtggtgcacaagcggtgccatgaatttgtcacattctcctgccctggcgctgacaagggtccagcctccgatgacccccgcagcaaacacaagtttaagatccacacgtactccagccccacgttttgtgaccactgtgggtcactgctgtatggactcatccaccaggggatgaaatgtgacacctgcatgatgaacgtgcacaagcgctgcgtgatgaatgttcccagcctgtgtggcacggaccacacggagcgccgcggccgcatctacatccaggcccacatcgacagggacgtcctcattgtcctcgtaagagatgctaaaaaccttgtacctatggaccccaatggcctgtcagatccctacgtaaaactgaaactgattcccgatcccaaaagtgagagcaaacagaagaccaaaaccatcaaatgctccctcaaccctgagtggaatgagacatttagatttcagctgaaagaatcggacaaagacagaagactgtcagtagagatttgggattgggatttgaccagcaggaatgacttcatgggatctttgtcctttgggatttctgaacttcagaaagccagtgttgatggctggtttaagttactgagccaggaggaaggcgagtacttcaatgtgcctgtgccaccagaaggaagtgaggccaatgaagaactgcggcagaaatttgagagggccaagatcagtcagggaaccaaggtcccggaagaaaagacgaccaacactgtctccaaatttgacaacaatggcaacagagaccggatgaaactgaccgattttaacttcctaatggtgctggggaaaggcagctttggcaaggtcatgctttcagaacgaaaaggcacagatgagctctatgctgtgaagatcctgaagaaggacgttgtgatccaagatgatgacgtggagtgcactatggtggagaagcgggtgttggccctgcccgggaagccgcccttcctgacccagctccactcctgcttccagaccatggaccgcctgtactttgtgatggagtacgtgaatgggggcgacctcatgtatcacatccagcaagtcggccggttcaaggagccccatgctgtattttacgctgcagaaattgccatcggtctgttcttcttacagagtaagggcatcatttaccgtgacctaaaacttgacaacgtgatgctcgattctgagggacacatcaagattgccgattttggcatgtgtaaggaaaacatctgggatggggtgacaaccaagacattctgtggcactccagactacatcgcccccgagataattgcttatcagccctatgggaagtccgtggattggtgggcatttggagtcctgctgtatgaaatgttggctgggcaggcaccctttgaaggggaggatgaggatgaactcttccaatccatcatggaacacaacgtagcctatcccaagtctatgtccaaggaagctgtggccatctgcaaagggctgatgaccaaacacccaggcaaacgtctgggttgtggacctgaaggtgaacgtgatatcaaagagcatgcatttttccggtatattgattgggagaaacttgaacgcaaagagattcagcccccttataagccaaaagcttgtgggcgaaatgctgaaaacttcgaccgatttttcacccgccatccaccagtcctaacacctcctgaccaggaagtcatcaggaatattgaccaatcagaattcgaaggattttcctttgttaactctgaatttttaaaacccgaagtcaagagctaagtagatgtgtagatctccgtccttcatttctgtcattcaagctcaacggctattgtggtgacatttttatgttttcattgccaagttgcatccatgtttgattttctgatgagactagagtgacagtgtttcagaacccaaatgtcctcaggtagttttggagcatctctatgagatgggattatgcagatggcctatggaaaatgcagctgcataattaacacattatcaaagtcctcttacaatttattttccgcagcatgtcagctaagtagacccaatggggagagaaaatgcctgctttctttcccttttttctgcactgccatattcacccccaaccatccaatctgtggataattggatgttagcggtactcttccacttccgggcctggagcttggcttgtatccaagtgtatggttgctttgcctaagaggaatccctctatttcacctgttctggaggcaccagaccttgaaaagaacatgctcaaaataaaatgttatctgttatttttgtaaactcaaagttaagatgatcaaagttctaaaattccaagaatgtgcttttagacggtctcaatctaaaagcacttcaaggggtcaaagggcaaccagcttgggtgctacctcagtgttgtagtttctgatactttatgtctttgctcaccctcatccccaaactacttgaaaagggcatttggcaccactctctgaaacaacacagtcactctagcaaggcccccaaagggccctggttttacattacatttcaaactttatttgctttggggttttgtttctgttgttgttcaaatgcaaaaaaaaattatttgctttggggttttatttctgttgttcaaatgc

SEQ ID NO: 20 - DNA, 1428 bp, Homo sapiens
atgaccggccaccacggctggggctacggccaggacgacggcccctcgcattggcacaagctgtatcccattgcccagggagatcgccaatcacccatcaatatcatctccagccaggctgtgtactctcccagcctgcaaccactggagctttcctatgaggcctgcatgtccctcagcatcaccaacaatggccactctgtccaggtagacttcaatgacagcgatgaccgaaccgtggtgactgggggccccctggaagggccctaccgcctcaagcagtttcacttccactggggcaagaagcacgatgtgggttctgagcacacggtggacggcaagtccttccccagcgagctgcatctggttcactggaatgccaagaagtacagcacttttggggaggcggcctcagcacctgatggcctggctgtggttggtgtttttttggagacaggagacgagcaccccagcatgaatcgtctgacagatgcgctctacatggtccggttcaagggcaccaaagcccagttcagctgcttcaaccccaagtgcctcctgcctgccagccggcactactggacctacccgggctctctgacgactcccccactcagtgagagtgtcacctggattgtgctccgggagcccatctgcatctctgaaaggcagatggggaagttccggagcctgctttttacctcggaggacgatgagaggatccacatggtgaacaacttccggccaccacagccactgaagggccgcgtggtaaaggcctccttccgggcctgagctgcccatctgcctagccggccactagggcaccatcttctcaagggcttccatgtcagcagacaccaaaccatctgaggcttcctccctggggggtgctggggaccctccttcagccagtttgctccttggtcaccctggaggcttctggatgggacccttgagtctggcggcagcccttccagctgccctggggacaggaaggagcaggagctaagcagggtccaagcctggggctgcctctgctctccaagacccaaagaccctgggaacctcctctggtcttcccactggcagtgcagcagccccaccccgagcgcacactgtgatggaggagactgagctccctggggcgggcagctgacactaccagagagactcaagcaataattagaggtgggcagagctgccctctcggcattacctcttctgcaggctctgccatgcacgcacctcactgccaggccattaaaatcagcacccagcatgctggaggtgacgtggccttctcctccagcactgtgccaggcaccctggctatagcttatacagtatctccccttgtccccacccagtcaccaaagccacctacatgacagtccatccctgttgaattaataaattaatgtatcc

SEQ ID NO: 21 - DNA, 3035 bp, Homo sapiens
  misc_feature (425)..(425): n is a, c, g, or t
  misc_feature (441)..(441): n is a, c, g, or t
  misc_feature (448)..(448): n is a, c, g, or t
  misc_feature (451)..(451): n is a, c, g, or t
  misc_feature (488)..(488): n is a, c, g, or t
  misc_feature (795)..(795): n is a, c, g, or t
  misc_feature (822)..(822): n is a, c, g, or t
  misc_feature (831)..(831): n is a, c, g, or t
  misc_feature (858)..(858): n is a, c, g, or t
  misc_feature (914)..(914): n is a, c, g, or t
  misc_feature (918)..(918): n is a, c, g, or t
  misc_feature (926)..(926): n is a, c, g, or t
  misc_feature (988)..(988): n is a, c, g, or t
  misc_feature (991)..(991): n is a, c, g, or t
  misc_feature (996)..(996): n is a, c, g, or t
  misc_feature (1009)..(1012): n is a, c, g, or t
  misc_feature (1015)..(1018): n is a, c, g, or t
  misc_feature (1023)..(1023): n is a, c, g, or t
  misc_feature (1035)..(1035): n is a, c, g, or t
  misc_feature (1042)..(1042): n is a, c, g, or t
  misc_feature (1054)..(1054): n is a, c, g, or t
  misc_feature (1057)..(1057): n is a, c, g, or t
  misc_feature (1508)..(1508): n is a, c, g, or t
  misc_feature (1601)..(1601): n is a, c, g, or t
  misc_feature (1620)..(1620): n is a, c, g, or t
  misc_feature (1638)..(1638): n is a, c, g, or t
  misc_feature (1949)..(1949): n is a, c, g, or t
  misc_feature (2460)..(2460): n is a, c, g, or t
  misc_feature (2475)..(2475): n is a, c, g, or t
  misc_feature (2480)..(2480): n is a, c, g, or t
aaaaagtcaactagaattgagaagaggtgattttttttcagatcgcttctcgagtttaatattttcacattcttttcaccctttttctcaatctagatttaaaattaggatatatgtcatttccttgtctgtatttgtagctccttagttaccagtatgcctctccattttctacaaataagaggttataacacatatacataattctaaccttaagggaacacacgtttacatactttacttcccaagcccttcctgtttggggtacagattgagagagtcatgaatcaacacatctagcaagaccacaggtgtaagagtctaagatcgtcttcaaaattctgaagtcccagtctttacctgtccagtgaatgaatattcagagcagcttttcctgggcttcccagtggtgatagctgaggtcnaaccacaaaaaataanaaagcangantgaaatgcacccctccagagaaacactttgtagtgtntaattctgttaatagagaagagctgcttctgtttgcgctcacttcatcagtggcacccttctgcagaattttaatataaaaacattatggatataatagaactggattttctgacttaaaaatgtaagttttattttaatcttgaaacgtggattgtttctgtggagctcttaaacatgagaagaatacttacggttgataatgtgtaacatgatctgaaatgtgactcatttgagcctctttgtcccatcgtcctgtttttgaattattgacattgtcagtctctttgcttcctgggtgagacttngggtttgagggacagggaatgaccttnttggtgaancttaaaatataacattgcaattgcagntgactttacagtgttaaattagagaaaatagtctgattttttaaaccttccttaanctgnaaaaaagncacatggttttaccaggattgaaataaacagtcaatgtgacttttaacatgtgtttttttgnaanaaagnacacgtactcttnnnntannnngttcnttatagggactntggcaantgctaacacagntgntttacaatgtttacaattcagacaatacgacttataatagaaaatcctcattcatttagcattgaaaagctggaagttgcttctttaatgttgaatagtatacagtggtattgagcatggactttctaaatgttttatatatacatataaaaatatattggtgtctcacacccagaaagatgttatattgtagatattattaggaaaacagtgtttctcaggaacgttgtaaattttaaatgatatatgtacttcccgtcctcccacctccactctgtgctctaatgtgagactgcttcagcagtgttgctaagttaatggaaaactttttctaatcaagtcaggtgaatgtgtattctgctaaataatgttagccatttacatgaattgtatggtcattaaatggaatcagtgattcctctttaatttccagaggggaaatgaattatgnaaatcagtcagcattctgatcattaaattttatactttaattttgccgttcagcattctaaatatccaatgtgaaagtcacatgataatttgntttgcattgcgtgcactgnacaacacttacaacttgncatttaaaatgttttctcgggaaatgaatgctagtcagaaagtaatagattgtattattcatagttttaaaattatgacaatgtcataattactacaaagctaaataatcgtgtttatttttgtgcagttgccctttgatagttcctggttttaaaacctattaagtgtataatcttacaaatagtcatctacaaaatttatggagaaagtgcccagcccattcacatcacatggaccaggaattcttttgtaaatgacttaaggtaacatcatgcagttcagtgcctaataaatgctttttaatgatgancatttctataatgactcgtaagataccatagtctgatttttctcacattaaaataactgaagtcacttgtgtaacgtagttatactttgctgcattttaattaaccttcaacagctattaaagtggaatgtaagttaaattttgaaggaaaggaaataaatgttttccatatttcgtcttgatttactttctgtatgagaacagctgtgtttttgataggtttatggtttgcatgagttcatatttaaagtgatccaggccaatgcatggctattgctgtaaatcttgatgtttatttctgccttgtaaagttctatcacggcctacctggaatttaaaattcagtagacaaattaattggtcctctgcacaacttttttaataagtagattattttacaaagaaatttgaacaaatttaattgaatcttttgtttagcttgcctctaagaacttttcttaataaagctcccaaaacttctcagcaaataaatctcccttaagtaggaaanctagatttcatattngcttnctttgaattaacagcaactttccacaggtaaatctgttcttgcaaagatgtgagcagaatagttaaaaataatatttttatgtttcatggttctaaatggaagccataaatgcagtaaatactatctgttgtttaactactttaatcgtcattttttacattttcaagtttattaggttaagaaaaacagggcagccttggaaggcagctactacagaaaactgcagttttgcgttaaagataaagtagtattttcagctccctgaaaaaccattcctgctgaaactgctgtagaaattgtgaagctgcatgagtggagagtattgaatctgtggttatagtagttttctcaggtttgtttatcttgatgtttgatgcactgtgttttatagttattaaaattgagtaatattatttctatgcagtgttatgtgtcattggccttttgtgaatgtgcatgttttaaactgcaaattttaaacattttgtcctctaattgttattaaaaatgaaataaactttaccattacttaaaaaaaaaaaaaaaaaaaaaaa

SEQ ID NO: 22 - DNA, 2475 bp, Homo sapiens
ccggaggagtccgagaggaagcggaggcgcgagctggaggcggcggctcccgtcggcctccggcaggactgagcgctgggaggccggaaggcgggcgcgcacggcggagaggcgggcgggaggccggagcatattaatgaaaagtgccataaactgaaaaaccaaacatgagggtagcaggtgctgcaaagttggtggtagctgtggcagtgtttttactgacattttatgttatttctcaagtatttgaaataaaaatggatgcaagtttaggaaatctatttgcaagatcagcattggacacagctgcacgttctacaaagcctcccagatataagtgtgggatctcaaaagcttgccctgagaagcattttgcttttaaaatggcaagtggagcagccaacgtggtgggacccaaaatctgcctggaagataatgttttaatgagtggtgttaagaataatgttggaagagggatcaatgttgccttggcaaatggaaaaacaggagaagtattagacactaaatattttgacatgtggggaggagatgtggcaccatttattgagtttctgaaggccatacaagatggaacaatagttttaatgggaacatacgatgatggagcaaccaaactcaatgatgaggcacggcggctcattgctgatttggggagcacatctattactaatcttggttttagagacaactgggtcttctgtggtgggaagggcattaagacaaaaagcccttttgaacagcacataaagaacaataaggatacaaacaaatatgaaggatggcctgaagttgtagaaatggaaggatgcatcccccagaagcaagactaatggaaatgtggagagaattgaagaaagcgcactttcactcttaatgggagagctataaatggcagagctatgtgtaaatattttaagagcatgcagccatcttggtgtgtgcatgagtattgtctcttttgatatcaggattatttattgctaacgtaaatagatagcattgtaaataatcatcacaatgatcaaatcactgaaccatgtctccgcacatttccctaaaagtacaatgtttagactgctatggtaatacatattttaaattctaaaagcatacacaatgtgtaactgaatggtttgtgaaaaatatattgatatatatactagttgctatgaaaatatcatggaataatagggattttagggtggatactttattttcttttatgtttctatatgttgcgttgtgatgacattatcttttaaattaaaaagagatttggctagttgtgtgtgtaatgttactttacagtccgactctcctgatgtacctcttttcatgatctttttctttccttcccaagaaactgaggaatgtttaatatgaaaacatacatcggatatgtgaaaagcacaacaaaattcttaatgtacacagtaaaaaagtaaatatataaatgtagatggcatttaggaccacagcttgctggatttgtgttagctatgggaataacttgattttgtataagctatttagagtgaggctggaggtggcagcttcacagaactggagaaccaggccaagtcccctccccaacctaattaggtcattcaggacagctaagtcagtatatttagagcaatactagcatacgtttttcttaattgttatcagcattgaccaagtggtttggaaggaggcatgctttaatatcacaataattttgatttgtaaaccaagaaattaatcctgtgtttatctaacttcataatagcaattattgcccgaagctatagtggcatatttacaaaagttcttattactgggcggactgataacatttaaaaaataattgtgtttgaccccaaatgactttatacccaattctacataaaaatatagaagatctatctttttttgttaccttcagatgttcactaaataactcagtttttaagcagaagttttcagggcattaaatatatgttgtgtatgaagtatctcaaactggaacataaatttagtgatcaaactgccattcacagtgtaaggcagcacttaaatttcgaacctaaagtttagatgcattgtataaaaaaacctaaaagcagtatctgttatttagctgtaaaccaagttggaagctattcggataatttcttaaatattgatgaactttggagtactgtttcttccttcaaactgaatgtaattaattcatgaataaatgcaccttatatgtttaaacaatctttgtatacttttgggatttttggtgcttatatgctaaatcacattcagcatgtgtattttgacatttaaaatacttccctcaattctgtaaattaaaagaatagttattttacagttccagggattgtgaaataaatgttgcagttttttaaaataatgaaaataaatactcttggttttgctttgtgaaaaaaaaaaaaaaaa

SEQ ID NO: 23 - DNA, 2532 bp, Homo sapiens
cggcgccgctcgctcccccgacccggactcccccatgtatgacgactcctacgtgcccgggtttgaggactcggaggcgggttcagccgactcctacaccagccgcccatctctggactcagacgtctccctggaggaggaccgggagagtgcccggcgtgaagtagagagccaggctcagcagcagctcgaaagggccaagcacaaacctgtggcatttgcggtgaggaccaatgtcagctactgtggcgtactggatgaggagtgcccagtccagggctctggagtcaactttgaggccaaagattttctgcacattaaagagaagtacagcaatgactggtggatcgggcggctagtgaaagagggcggggacatcgccttcatccccagcccccagcgcctggagagcatccggctcaaacaggagcagaaggccaggagatctgggaacccttccagcctgagtgacattggcaaccgacgctcccctccgccatctctagccaagcagaagcaaaagcaggcggaacatgttcccccatatgacgtggtgccctccatgcggcctgtggtgctggtgggaccctctctgaaaggttatgaggtcacagacatgatgcagaaggctctcttcgacttcctcaaacacagatttgatggcaggatctccatcacccgagtcacagccgacctctccctggcaaagcgatctgtgctcaacaatccgggcaagaggaccatcattgagcgctcctctgcccgctccagcattgcggaagtgcagagtgagatcgagcgcatatttgagctggccaaatccctgcagctagtagtgttggacgctgacaccatcaaccacccagcacagctggccaagacctcgctggcccccatcatcgtctttgtcaaagtgtcctcaccaaaggtactccagcgtctcattcgctcccgggggaagtcacagatgaagcacctgaccgtacagatgatggcatatgataagctggttcagtgcccaccggagtcatttgatgtgattctggatgagaaccagctggaggatgcctgtgagcacctggctgagtacctggaggtttactggcgggccacgcaccacccagcccctggccccggacttctgggtcctcccagtgccatccccggacttcagaaccagcagctgctgggggagcgtggcgaggagcactccccccttgagcgggacagcttgatgccctctgatgaggccagcgagagctcccgccaagcctggacaggatcttcacagcgtagctcccgccacctggaggaggactatgcagatgcctaccaggacctgtaccagcctcaccgccaacacacctcggggctgcctagtgctaacgggcatgacccccaagaccggcttctagcccaggactcagagcacaaccacagtgaccggaactggcagcgcaaccggccttggcccaaggatagctactgacagcctcctgctgccctaccctggcaggcacaggcgcagctggctggggggcccactccaggcagggtggcgttagactggcatcaggctggcactaggctcagcccccaaaaccccctgcccagccccagcttcagggctgcctgtggtcccaaggttctgggagaaacaggggaccccctcacctcctgggcagtgacccctactaggctcccattccaggtactagctgtgtgttctgcacccctggcaccttcctctcctcccacacaggaagctgccccactgggcagtgccctcaggccaggatccccttagcagggtccttcccaccagactcagggaagggatgccccattaaagtgacaaaagggtggggtgtgggcaccatggcatgaggaagaaacaaggtccctgagcaggcacaagtcctgacagtcaagggactgctttggcatccagggcctccagtcacctcactgccatacattagaaatgagacaatcaaagccccccccagggtggcacacccatccgtttgctggggtgtggcagccacatccaagactggagcagcaggctggccacgctcgggccagagagagctcacagctgaagctcttggagggaagggctctcctcaccctgccaggaagcttcttaacatgtgacaggaccagggaccaggagcatggtgaagccaagtggcagatgggagccaacctggatgggggtttggggaaggagggcatgtgtagcagagaacttaggggggcctccttgcctttctcattcttttgccctgcatcctgtcatttctgttcttgtccctcatacatctttggagaaccgggctccagactttgttccctgactcatagctgccgcttgttaggttagggttagatggggagagacagggcacagaggacctgtctccccggctactcttgccttatggctctagtgtgtgacctacagagcatgctccacaagcccctgcctcacctcactgtcatcactaataaacatcatgcacagtc

SEQ ID NO: 24 - DNA, 1040 bp, Homo sapiens
ggaattcggcacgagattcaaagcaacaccaccaccactgaagtatttttagttatataagattggaactaccaagcatgtggctcctggtcagtgtaattctaatctcacggatatcctctgttgggggagaagcaatgttctgtgattttccaaaaataaaccatggaattctatatgatgaagaaaaatataagccattttcccaagttcctacaggggaagttttctattactcctgtgaatataattttgtgtctccttcaaaatccttttggactcgcataacgtgcgcagaagaaggatggtcaccaacaccaaagtgtctcagactgtgtttctttccttttgtggaaaatggtcattctgaatcttcaggacaaacacatctggaaggtgatactgtacaaattatttgcaacacaggatacagacttcaaaacaatgagaacaacatttcatgtgtagaacggggctggtccactcctcccaaatgcaggtccactatttctgcagaaaaatgtgggccccctccacctattgacaatggagacattacttcattcctgttgtcagtatatgctccaggttcatcagttgagtaccagtgccagaacttgtatcaacttgagggtaacaatcaaataacatgtagaaacggacaatggtcagaaccaccaaaatgcttagatccatgtgtaatatcacaagaaattatggaaaaatataacataaaattaaagtggacaaaccaacaaaagctttattcaagaacaggtgacatagttgaatttgtttgtaaatctggatatcatccaacaaaatctcattcatttcgagcaatgtgtcagaatgggaaactggtatatcccagttgtgaggaaaaatagaatcaatggcattactattagtaaaatgcacacctttttctgaatttactattatatttgttttcaatttcatttttcaagtactgttttactcatttttattcataaataaagttttgtgttgatttgtgaaaatgcaattacaaaaaa

SEQ ID NO: 25 - DNA, 12903 bp, Homo sapiens
  misc_feature (451)..(451): n is a, c, g, or t
  misc_feature (499)..(499): n is a, c, g, or t
  misc_feature (5791)..(5791): n is a, c, g, or t
  misc_feature (6009)..(6009): n is a, c, g, or t
  misc_feature (6012)..(6012): n is a, c, g, or t
  misc_feature (6059)..(6059): n is a, c, g, or t
  misc_feature (6081)..(6083): n is a, c, g, or t
  misc_feature (6091)..(6091): n is a, c, g, or t
  misc_feature (6095)..(6095): n is a, c, g, or t
  misc_feature (6125)..(6125): n is a, c, g, or t
  misc_feature (6130)..(6131): n is a, c, g, or t
  misc_feature (6138)..(6139): n is a, c, g, or t
  misc_feature (12061)..(12061): n is a, c, g, or t
  misc_feature (12460)..(12460): n is a, c, g, or t
  misc_feature (12875)..(12875): n is a, c, g, or t
  misc_feature (12886)..(12888): n is a, c, g, or t
  misc_feature (12890)..(12890): n is a, c, g, or t
  misc_feature (12894)..(12899): n is a, c, g, or t
  misc_feature (12903)..(12903): n is a, c, g, or t
atgatttacaggaagaccatgtactcagctgcagcttctaaatccagaacgatttgcacgtcttatcaaggaagtaatgaatacattctggcctggcagagaattgattgttcaatggtatccatttgatgaaaacagaaatcacccatctgtttcatggcttaagatggtttggaaaaatctttatatacatttttcagaggatttgactttatttgatgagatgccacttatccccagaactatactagaggaaggtcagacatgtgtggaactcattagactcaggattccatcgttagtcattttagacgatgaatctgaagcacagcttccagaatttttagcagacattgtacaaaaacttggagggtttgtccttaaaaaattagatgcatctatacaacatccgcttattaaaaaatatattcattcaccattaccaagtgcngttttgcagataatggagaagatgccattgcagaaattgtgtaatcanataacttcgctacttccaacacacaaagatgccctgaggaagttcttggctagtttaaccgatagcagtgagaaagagaaaagaattattcaagaattggcaatattcaagcgcattaaccattcttctgatcagggaatttcctcttatacaaaattgaaaggttgtaaagtcttacaccatactgccaaactcccagcagatctgcgactttctatttcagtaatagacagtagtgatgaagctactattcgtctggcaaacatgttgaaaatagaacagttaaagaccactagctgcttaaagcttgttttaaaagatattgaaaatgcattttattcacatgaagaggtaacacagcttatgttatgggtccttgagaatctatcttctcttaaaaatgagaatccaaatgtgcttgagtggttaacaccattaaaattcatccagatatcacaggaacagatggtatcagctggtgaactctttgaccctgatatagaagtactaaaggatctcttttgtaatgaagaaggaacctatttcccaccctcagtttttacctcaccagatattcttcactccttaagacagattggtttaaaaaacgaagccagtctcaaagaaaaggatgttgtgcaagtggcaaaaaaaattgaagccttacaggtcggtgcttgtcctgatcaagatgttcttctgaagaaagccaaaaccctcttactggttttaaataagaatcacacactgttgcaatcatctgaaggaaagatgacattgaagaaaataaaatgggttccagcctgcaaggaaaggcctccaaattatccaggctctttggtctggaaaggagatctctgtaatctctgtgcaccaccagatatgtgtgatgtaggccatgcaattctcattggctcctcacttcctcttgttgaaagtatccatgtaaacctggaaaaagcattagggatcttcacaaaacctagccttagtgctgtcttaaaacactttaaaattgttgttgattggtattcttcaaaaacctttagtgatgaagactactatcaattccagcatattttgcttgagatttacggattcatgcatgatcatctaaatgaagggaaagattcttttagagccttaaaatttccatgggtttggactggcaaaaagttttgtccacttgcccaggctgtgattaaaccaatccatgatcttgaccttcagccttatttgcataatgtacctaaaaccatggcaaaattccaccaactatttaaggtctgtggttcaatagaggagttgacatcagatcatatttccatggttattcagaagatatatctcaaaagtgaccaagatctcagtgaacaagaaagcaaacaaaatcttcatcttatgttgaatattatcagatggctgtatagcaatcagattccagcaagccccaacacaccagttcctatacatcatagcaaaaatccttctaaacttatcatgaagccaattcacgaatgctgttattgtgacattaaagttgatgaccttaatgacttacttgaagattctgtggaaccaatcattttggtgcatgaggacatacccatgaaaactgcagaatggctaaaagttccatgccttagtacaagactgataaatcctgaaaacatgggatttgagcagtcaggacaaagagagccacttactgtaagaattaaaaatattctggaagaatacccttcagtgtcagatatttttaaagaactacttcaaaacgctgatgatgcaaatgcaacagaatgcagtttcttgattgatatgagaagaaatatggacataagagagaatctcctagacccagggatggcagcttgtcatggacctgctttgtggtcattcaacaattctcaattctcagattcagattttgtgaacataactaggttaggagaatctttaaaaaggggagaagttgacaaagttggaaaatttggtcttggatttaattctgtgtaccatatcactgacattcccatcattatgagtcgggaattcatgataatgttcgatccaaacataaatcatatcagtaaacacattaaagacaaatccaatcctgggatcaaaattaattggagtaaacaacagaaaagacttagaaaatttcctaatcagttcaaaccatttatagatgtatttggctgtcagttacctttgactgtagaagcaccttacagctataatggaacccttttccgactgtcctttagaactcaacaggaagcaaaagtgagtgaagttagtagtacgtgctacaatacagcagatatttattctcttgtggatgaatttagtctctgtggacacaggcttatcattttcactcagagtgtaaagtcaatgtatttgaagtacttgaaaattgaggaaaccaaccccagtttagcacaagatacagtaataattaaaaaaaaatcctgctcttccaaagcattgaacacacctgtcttaagtgttttaaaagaggctgctaagctcatgaagacttgcagcagcagtaataaaaagcttcccagtgatgaaccaaagtcatcttgcattcttcagatcacagtggaagaatttcaccatgtgttcagaaggattgctgatttacagtcgccactttttagaggtccagatgatgacccagctgctctctttgaaatggctaagtctggccaatcaaaaaagccatcagatgagttgtcacagaaaacagtagagtgtaccacgtggcttctgtgtacttgcatggacacaggagaggctctgaagttttccctgagtgagagtggaagaagactaggactggttccatgtggggcagtaggagttcagctgtcagaaatccaggaccagaagtggacagtgaaaccacacattggagaggtgttttgctatttacctttacgaataaaaacaggcttgccagttcatatcaatgggtgctttgctgttacatcaaataggaaagaaatctggaaaacagatacaaaaggacgatggaataccacgttcatgagacatgttattgtgaaagcttacttacaggtactgagtgtcttacgggacctggccactagtggggagctaatggattatacttactatgcagtatggcccgatcctgatttagttcatgatgatttttctgtaatttgccaaggattttatgaagatatagctcatggaaaagggaaagaactgaccaaagtcttctctgatggatctacttgggtttccatgaagaacgtaagatttctagatgactctatacttaaaagaagagatgttggttcagcagccttcaagatatttttgaaatacctcaagaagactgggtccaaaaacctttgtgctgttgaacttccttcttcggtaaaattaggatttgaagaagctggctgcaaacagatactacttgaaaacacattttcagagaaacagtttttttctgaagtgttttttccaaatattcaagaaattgaagcagaacttagagatcctttaatgatctttgttctaaatgaaaaagttgatgagttctcgggagttcttcgtgttactccatgtattccttgttccttggaggggcatcctttggttttgccatcaagattgatccaccccgaaggacgagttgcaaagttatttgatattaaagatgggagattcccttatggttctactcaggattatctcaatcctattattttgattaaactagttcagttaggtatggcaaaagatgatattttatgggatgatatgctagaacgtgcagtgtcagtagctgaaattaataaaagtgatcatgttgctgcatgcctaagaagtagtatcttattgagtcttatcgatgagaaactaaaaataagggatcctagagcaaaggattttgctgcaaaatatcaaacaatccgcttccttccatttctgacaaaaccagcaggtttttctttggactggaaaggcaacagttttaagcctgaaaccatgtttgcagcaactgacctttatacagctgaacatcaagatatagtttgtcttttgcaaccaattctaaatgaaaattcccattcttttagaggttgtggttcagtgtcattggctgttaaagagtttttgggattactcaagaagccaacagttgatctggttataaaccaattgaaagaagtagcaaaatcagttgatgatggaattacactgtaccaggagaatatcaccaatgcttgctacaaataccttcatgaagccttgatgcaaaatgaaatcactaagatgtcaattattgataagttaaaaccctttagcttcattctagttgagaatgcatatgttgactcagaaaaggtttcttttcatttaaattttgaggcggcaccatacctttatcagttgcctaataagtataaaaataatttccgcgaactttttgaaaccgtgggtgtgaggcagtcatgcactgttgaagattttgctcttgttttggaatctattgatcaagaaagaggaacaaagcaaataacagaagagaattttcagctttgccgacgaataatcagtgaaggaatatggagtctcattagagaaaagaaacaagaattttgtgagaaaaattatggcaagatattattgccagatactaatcttatgcttctccctgctaaatcgttatgctacaatgattgcccttggataaaagtaaaggataccactgtaaaatattgtcatgctgacatacccagggaagtagcagtaaaactaggagcagtcccaaagcgacacaaagccttagaaagatatgcatccaatgtctgttttacaacacttggcacagaatttgggcagaaagaaaaattgaccagcagaattaagagcatccttaatgcatatccttctgaaaaggaaatgttgaaagagcttcttcaaaatgctgatgatgcaaaggcgacagaaatctgttttgtgtttgatcctagacagcatccagttgatagaatatttgatgataagtgggccccattgcaagggccagcactttgtgtgtacaacaaccagccatttacagaagatgatgttagaggaattcagaatcttggaaaaggcacgaaagagggaaatccttataaaactggacagtatggaataggattcaattctgtgtatcatatcacagactgcccatcttttatttctggcaatgacatcctgtgtatttttgatcctcatgccagatatgcnccaggggccacatccattagtcccggacgcatgtttagagatttggatgcagattttaggacacagttctcagatgttctggatctttatctgggaacccattttaaactggataattgcacaatgttcagatttcctcttcgtaatgcagaaatggcaaaagtttcggaaatttcgtctgttccagcatcagacagaatggtccagaatcttttggnacnaaactgcgctcagatggggcagaacttctaatgtttcttaatcacantggaaaaaatttctatttgtgnnnaaatagantaangagtactggagctctaaatgtgctgtattncagtnnaagggcnnaaatcacagatggagacagattgaaaaggaaacaatttcatgcatctgtaattgatagtgttactaaaaagaggcagctcaaagacataccagttcaacaaataacctatactatggatactgaggactctgaaggaaatcttactacgtggctaatttgtaatagatcaggcttttcaagtatggagaaagtatctaaaagtgtcatatcagctcacaagaaccaagatattactcttttcccacgtggtggagtagctgcctgcattactcacaactataaaaaaccccatagggccttctgttttttgcctctttctttggagactgggctgccatttcatgtgaatggccactttgcactggattcagccagaaggaacctgtggcgtgatgataatggagttggtgttcgaagtgactggaataacagtttaatgacagcattaatagctcctgcatatgttgaattgctaatacagttaaaaaaacggtatttccctggttctgatccaacattatcagtgttacagaacacccctattcatgttgtaaaggacactttaaagaagtttttatcgtttttcccagttaaccgtcttgatctacagccagatttatattgtctagtgaaagcactttacaattgcattcacgaagacatgaaacgtcttttacctgttgtgcgggctccaaatattgatggctctgacttgcactctgcagttataattacttggatcaatatgtctacttctaataaaactagaccattttttgacaatttactacaggatgaattacaacaccttaaaaatgcagattataatatcaccacacgcaaaacagtagcagagaatgtctataggctgaaacatctccttttagaaattggtttcaacttggtttataactgtgatgaaactgctaatctttaccactgtcttatagatgcagatattcctgttagttatgtgacccctgctgatatcagatcttttttaatgacattttcctctcctgacactaattgccatattgggaagctgccttgtcgtctgcagcagactaatctaaaactttttcatagtttaaaacttttagttgattattgttttaaagatgcagaagaaaatgagattgaagttgagggattgccccttctcatcacactggacagtgttttgcaaacttttgatgcaaaacgacccaagtttctaacaacatatcatgaattgattccatcccgcaaagacttgtttatgaatacattatatttgaaatatagtaatattttattgaactgtaaagttgcaaaagtgtttgacatttccagctttgctgatttgttatcctctgtgttgcctcgagaatataagaccaaaagttgcacaaagtggaaagacaattttgcaagtgagtcttggcttaagaatgcatggcattttattagtgaatctgtaagtgtgaaagaagatcaggaagaaacaaaaccaacatttgacattgttgttgatactctaaaagactgggcattgcttccaggaacaaagtttactgtttcagccaaccagcttgtggttcctgaaggagatgttctgcttcctctcagccttatgcacattgcagtttttccaaatgcccagagtgataaagtttttcatgctctaatgaaagccggctgtattcagcttgctttgaacaaaatctgttccaaagacagtgcatttgttcctttgttgtcatgtcacacagcaaatatagagagccccacaagcatcttgaaggctctacattatatggtccaaacttcaacatttagagcagaaaaattagtagaaaatgattttgaggcacttttgatgtatttcaactgcaatttgaatcatttgatgtcccaagatgatataaaaattctaaagtcacttccgtgctataaatccatcagtggccgctatgtaagcattggaaaatttggaacatgctacgtacttacaaaaagtatcccttcagctgaagtggagaaatggacacaatcatcatcatctgcatttcttgaagaaaaaatacacttaaaagaactatatgaggtgattggttgtgtacctgtagatgatcttgaggtatatttgaaacacctcttaccaaaaattgaaaatctctcttatgatgcaaaattagagcacttgatctaccttaagaatagattatcaagtgctgaggaattatcagagattaaggaacaactttttgaaaaactggaaagtttattgataatccatgatgctaacagtagactaaagcaagcaaagcatttctatgatagaactgtgagagtttttgaagttatgcttcctgaaaaattgtttattcctaatgatttctttaagaaattggaacaacttataaaacccaaaaatcatgttacatttatgacatcctgggtggaattcttaagaaatattggactaaaatacatactttctcagcagcagttgttacagtttgctaaggaaatcagtgtgagggctaatacagaaaactggtccaaagaaacattgcaaaatacagttgatatccttctgcatcatatattccaagaacgaatggatttgttatctggaaattttctgaaagaactatctttaataccattcttatgtcctgagcgggcccccgcggaattcattagatttcatcctcaatatcaagaggtaaatggaacacttcctcttataaagttcaatggagcacaggtaaatccaaaattcaagcaatgtgatgtactccagctgttatggacatcctgccctattcttccagagaaagctacacccttaagcattaaagaacaagaaggtagtgaccttggtccacaagaacagcttgaacaagttttaaatatgcttaatgttaacctggatcctcctcttgataaggtaatcaataactgcagaaacatatgcaacataacgacgttggatgaagaaatggtaaaaactagagcaaaagtcttaaggagcatatatgaattcctcagtgcagaaaaaagggaatttcgttttcagttgcgaggggttgcttttgtgatggtagaagatggttggaaacttctgaagcctgaggaggtagtcataaacctagaatatgaatctgattttaaaccttatttgtacaagctacctttagaacttggcacatttcaccagttgttcaaacacttaggtactgaagatattatttcaactaagcaatatgttgaagtgttgagccgcatatttaaaaattctgagggcaaacaattagatcctaatgaaatgcgtacagttaagagagtagtttctggtctgttcaggagtctacagaatgattcagtcaaggtgaggagtgatctcgagaatgtacgagaccttgcgctttacctcccaagccaggatggtagattggtaaagtcaagcatcttagtgtttgacgatgcgccacattataaaagtagaatccaggggaatattggtgtgcaaatgttagttgatctcagccagtgctacttagggaaagaccatggatttcacactaagttgataatgctctttcctcaaaaacttagacctcgattattgagcagtatacttgaagaacaattagatgaagagactcccaaagtttgtcagtttggagcgttgtgttctcttcaaggaagattgcagttactcttgtcttctgaacagttcattacaggactgattagaattatgaagcatgaaaatgataatgcttttctggccaatgaagaaaaagccataagactttgcaaagccctaagagaaggattgaaagtatcctgctttgaaaagcttcaaacaacattaagagttaaaggttttaatcctattccccacagcagaagtgaaacttttgcttttttgaagcgatttggtaatgcagtcatcttgctctacattcaacattcagacagtaaagacattaatttcctgttagcactggcaatgactcttaaatcagcaactgacaatttgatttctgacacttcatatttaattgctatgctaggatgcaatgatatttacaggattggtgagaaacttgacagtttaggagtgaaatatgactcttcggagccatcaaaactggaacttccaatgcctggcacaccaattcctgctgaaattcattacactctgcttatggacccaatgaatgttttttacccgggagaatatgttgggtaccttgttgatgctgaaggtggtgatatctatggatcataccagccaacatacacatatgcaattattgtacaagaagttgaaagagaagatgctgacaattctagttttctaggaaagatatatcagatagatattggttatagtgaatataaaatagttagctctcttgatctgtataagttttcaagacctgaggaaagctctcaaagcagggacagtgctccttctacaccaaccagccccactgagttcctcacccctggcctgagaagcattcctcctcttttctctggtagagagagccacaagacttcttccaaacatcagtcccccaaaaagcttaaggttaattctttaccagaaatcttaaaagaagtgacatctgtggtggagcaagcatggaagcttccagaatcggaacgaaaaaagattattaggcggttgtatttgaaatggcatcctgacaaaaatccagagaaccatgacattgccaatgaagtttttaaacatttgcagaatgaaatcaacagattagaaaaacaggcttttctagatcaaaatgcagacagggcctccagacgaacattttcaacctcagcatcccgatttcagtcagacaaatactcatttcagagattctatacttcatggaatcaagaagcaacgagccataaatctgaaagacagcaacagaacaaagaaaaatgccccccttcagccggacagacttactctcaaaggttctttgttcctcccactttcaagtcggttggcaatccagtggaagcacgcagatggctaagacaagccagagcaaacttctcagctgccaggaatgaccttcataaaaatgccaatgagtgggtgtgctttaaatgttacctttctaccaagttagctttgattgcagctgactatgctgtgaggggaaagtctgataaagatgtaaaaccaactgcacttgctcagaaaatagaggaatatagtcagcaacttgaaggactgacaaatgatgttcacacattggaagcttatggtgtagacagtttaaaaacaagataccctgatttgcttccctttcctcagatcccaaatgacaggttcacttctgaggttgctatgagggtgatggaatgtactgcctgtatcataataaaacttgaaaattttatgcaacaaaaagtgtgaagatatttaacgaaaaaaaaggtagatcttgaatgtgttgtagcacgaataaattgctgtacttcattaagcttcattgccaattagctaggaattgttaagcacattgcagattgttcttggagaattctggagttgttatgaacatgaataccaacggaaaaccttaactgaatctaaaagaaaactattttgaagatggtggtgagctgcaaaatagctggatggatttgaatgattgggatgatacatcattgaactgcactttatataaccaaagcttagcagtttgttagataagagtctatgtatgtctctggttaggatgaagttaattttatgtttttaacatggtatttttgaaggagctaatgaaacactggacatataattggtttaaacataaggggaattaagtctttgtagtctgtcatttttttaagtggatcctcttggatgcgttattttctcatcagctggctcngatcatgaatttgttgtaattttatgttgtactcagtgcatttaagaaatggtagagtattttaatcctattacttgactaagagtgtgaaggtagtactttttagagtgcactgagtgcactttacatctttatttaaatttttttttaacatcttatgtttacaggcttcctgtttgatgaagatagcaacggaaaactcaaaatggtggcagttcttattaccagttgttagtattgtttctggaaactgcttgccaagacaacatttattaactgttagaacacttgctttatgtttgtgtgtacatattttccacaaatgttataatttatatagtgtggttgaacaggatgcaatcttttgttgtctaaaggtgctgcagttaaaaaaaaaancaaccttttctttcaatatggcatgtagtggagtttttttaactttaaaaacatcaaaaattgttaaaatcattgtgttatctagtagtttataattatcggcttatatttccccatgaatgatcagaactgacatttaattcatgtttgtctcgccatgcttctttactttaacatatttcttttgcagaatgtaaaaggtaatgataattagtttatataagtgtactggctgtaaatgatgctaaatatactttatgcaattaagggcttacagaacatgttgaaactttttttacttttattgggaataaggaatgtttgcacctccacattttattgcttctggatgtgaaatcatgtaattatttctgctgttatataaagtgccatacttttaataaaggaaaatgtnacatatgaaannnanaaannnnnnaaan

SEQ ID NO: 26 - DNA, 1164 bp, Homo sapiens
  misc_feature (31)..(35): n is a, c, g, or t
  misc_feature (37)..(37): n is a, c, g, or t
  misc_feature (39)..(47): n is a, c, g, or t
  misc_feature (49)..(49): n is a, c, g, or t
  misc_feature (51)..(52): n is a, c, g, or t
  misc_feature (54)..(54): n is a, c, g, or t
  misc_feature (56)..(62): n is a, c, g, or t
  misc_feature (64)..(69): n is a, c, g, or t
  misc_feature (71)..(71): n is a, c, g, or t
  misc_feature (73)..(77): n is a, c, g, or t
  misc_feature (79)..(79): n is a, c, g, or t
  misc_feature (81)..(82): n is a, c, g, or t
  misc_feature (124)..(124): n is a, c, g, or t
  misc_feature (126)..(126): n is a, c, g, or t
  misc_feature (128)..(128): n is a, c, g, or t
  misc_feature (132)..(132): n is a, c, g, or t
  misc_feature (823)..(823): n is a, c, g, or t
  misc_feature (826)..(826): n is a, c, g, or t
  misc_feature (927)..(930): n is a, c, g, or t
  misc_feature (967)..(968): n is a, c, g, or t
  misc_feature (984)..(984): n is a, c, g, or t
  misc_feature (1160)..(1160): n is a, c, g, or t
taccgagctcggatccactagtaacggccgnnnnngngnnnnnnnnngncnntncnnnnnnnannnnnngngnnnnngngnnggcaggtggattgttggtctgcgtggaacttctcaggtgganancngccnccgtcagacatccacgacagcgatggcagttccagcagcagccaccagagcctcaagagcacagccaaatgggcggcatccctggagaatctgctggaagacccagaaggcgtgaaaagatttagggaatttttaaaaaaggaattcagtgaagaaaatgttttgttttggctagcatgtgaagattttaagaaaatgcaagataagacgcagatgcaggaaaaggcaaaggagatctacatgacctttctgtccagcaaggcctcatcacaggtcaacgtggaggggcagtctcggctcaacgagaagatcctggaagaaccgcaccctctgatgttccagaaactccaggaccagatctttaatctcatgaagtacgacagctacagccgctttcttaaagtctgacttgtttttaaaacacaagcgaaccgaggaagaggaagaagatttgcctgatgctcaaactgcagctaaaagagcttccagaatttataacacatgagcccccaaaaagccgggactggcagctttaagaagcaaaggaatttcctctcaggaccgtgccgggtttatcattgctttgttatttgtaaggactgaaatgtacaaaacccttcaatgggatgtgtgttttattaactgcttcaccagtaaattttgcatgatggctaagctaacataaaaaaanaanaataataacttggaagttttagtttacaaaacagagattccttcaacactggacacgtcgagcattttgtagcttaattaaacctcatgtaaggccaaaannnnaaacgtatcacactaccttttaccttgtaagtgtttnntctgcctctctggtgnagtggacgcatgtccacaggtcacttggtaaattaactcaaacatgagttgatccggcaaacccaggctactgggggtatggcctgccagtcgccttttgggttaaatatttctcgagagcaagttcagtgctggaaaaagaaaatgaatcactgacagcctctaaagacttgganacta

SEQ ID NO: 27 - DNA, 4330 bp, Homo sapiens
  misc_feature (2)..(7): n is a, c, g, or t
  misc_feature (9)..(9): n is a, c, g, or t
  misc_feature (20)..(20): n is a, c, g, or t
  misc_feature (2452)..(2452): n is a, c, g, or t
  misc_feature (2456)..(2456): n is a, c, g, or t
  misc_feature (3312)..(3312): n is a, c, g, or t
  misc_feature (3550)..(3550): n is a, c, g, or t
  misc_feature (3562)..(3562): n is a, c, g, or t
  misc_feature (3572)..(3572): n is a, c, g, or t
  misc_feature (3598)..(3598): n is a, c, g, or t
  misc_feature (3621)..(3621): n is a, c, g, or t
  misc_feature (3699)..(3699): n is a, c, g, or t
  misc_feature (4140)..(4140): n is a, c, g, or t
  misc_feature (4180)..(4180): n is a, c, g, or t
  misc_feature (4199)..(4199): n is a, c, g, or t
  misc_feature (4203)..(4205): n is a, c, g, or t
gnnnnnngnggcaggtgccngacatggcgagtgtagtgctgccgagcggatcccagtgtgcggcggcagcggcggcggcggcgcctcccgggctccggctccggcttctgctgttgctcttctccgccgcggcactgatccccacaggtgatgggcagaatctgtttacgaaagacgtgacagtgatcgagggagaggttgcgaccatcagttgccaagtcaataagagtgacgactctgtgattcagctactgaatcccaacaggcagaccatttatttcagggacttcaggcctttgaaggacagcaggtttcagttgctgaatttttctagcagtgaactcaaagtatcattgacaaacgtctcaatttctgatgaaggaagatacttttgccagctctataccgatcccccacaggaaagttacaccaccatcacagtcctggtcccaccacgtaatctgatgatcgatatccagaaagacactgcggtggaaggtgaggagattgaagtcaactgcactgctatggccagcaagccagccacgactatcaggtggttcaaagggaacacagagctaaaaggcaaatcggaggtggaagagtggtcagacatgtacactgtgaccagtcagctgatgctgaaggtgcacaaggaggacgatggggtcccagtgatctgccaggtggagcaccctgcggtcactggaaacctgcagacccagcggtatctagaagtacagtataagcctcaagtgcacattcagatgacttatcctctacaaggcttaacccgggaaggggacgcgcttgagttaacatgtgaagccatcgggaagccccagcctgtgatggtaacttgggtgagagtcgatgatgaaatgcctcaacacgccgtactgtctgggcccaacctgttcatcaataacctaaacaaaacagataatggtacataccgctgtgaagcttcaaacatagtggggaaagctcactcggattatatgctgtatgtatacgatccccccacaactatccctcctcccacaacaaccaccaccaccaccaccaccaccaccaccaccatccttaccatcatcacagattcccgagcaggtgaagaaggctcgatcagggcagtggatcatgccgtgatcggtggcgtcgtggcggtggtggtgttcgccatgctgtgcttgctcatcattctggggcgctattttgccagacataaaggtacatacttcactcatgaagccaaaggagccgatgacgcagcagacgcagacacagctataatcaatgcagaaggaggacagaacaactccgaagaaaagaaagagtacttcatctagatcagcctttttgtttcaatgaggtgtccaactggccctatttagatgataaagagacagtgatattggaacttgcgagaaattcgtgtgtttttttatgaatgggtggaaaggtgtgagactgggaaggcttgggatttgctgtgtaaaaaaaaaaaaaaatgttctttggaaagtacactctgctgtttgacacctcttttttcgtttgtttgtttgtttaatttttatttcttcctaccaagtcaaacttggatacttggatttagtttcagtagattgcagaaaattctgtgccttgttttttgtttgtttgttgcgttcctttcttttccccctttgtgcacatttatttcctccctctaccccaatttcggattttttccaaaatctcccattttggaatttgcctgctgggattccttagactcttttccttcccttttctgttctagttttttacttttgtttatttttatggtaactgctttctgttccaaattcagtttcataaaaggagaaccagcacagcttaggatttcatagttcagaatttagtgtatccataatgcattcttctctgttgtcgtaaagatttgggtgaacaaacaatgaaaactctttgctgctgcccatgtttcaaatacttagagcagtgaagactagaaaattagactgtgattcagaaaatgttctgtttgctgtggaactacattactgtacagggttatctgcaagtgaggtgtgtcacaatgagattgaatttcactgtctttaattctgtatctgtagacggctcagtatagataccctacgctgtccagaaaggtttggggcagaaaggactcctcctttttccatgccctaaacagacctgacaggtgaggtctgttccttttatataagtggacaaattttgagttgccacaggaggggaagtagggaggggggaaatacagttctgctctggttgtttctgttccaaatgattccatccacctttcccaatcggccttacttctcactaatttgtaggaaaaagcaagttcgtctgttgtgcgaatgactgaatgggacagagttgattttttttttttttntccnttgtgcttagttaggaaggcagtaggatgtggcctgcatgtactgtatattacagatatttgtcatgctgggatttccaactcgaatctgtgtgaaactttcattccttcagatttggcttgacaaaggcaggaggtacaaaagaagggctggtattgttctcacactggtctgctgtcgctctcagttctcgataggtcagagcagaggtggaaaaacagcatgtacggattttcagttacttaatcaaaactcaaatgtgagtgtttttatctttttacctttcatacactagccttggcctctttcctcagccttaagaaccatctgccaaaaattactgatcctcgcatgatggcagccatagtgcatagctactaaaatcagtgaccttgaacatatcttagatggggagcctcgggaaaaggtagaggagtcacgttaccatttacatgttttaaagaaagaagtgtggggattttcactgaaacgtctaggaaatctagaagtagtcctgaaggacagaaactaaactcttaccatatgtttggtaagactccagactccagctaacagtccctatggaaagatggcatcaaaaaagatagatctatatatatatataaatatatattctattacattttcagtgagtaattttggattttgcaaggtgcatttttactattgttacattatgtggaaaacttatgctgatttatttaagggggaaaaagtgtcaactctttgttatttgaaaacatgtttatttttcttgtctttattttaacctttgatagaaccattgcaatatgggggccttttgggaacggactggtatgtaaaagaaaatccnttatcgagcagcattttatttacccctcccctatccctaggcacttaaccaagacaaaaagccacaatgaacatccctttttcaatgaattttataatctgcagctctattccgagcccttagcacccattccgaccatagtataatcatatcaaagggtgagaatcatttagcatgttgttgaaaggttttttttcagttgttctttttagaaaaaaagaaaaacaaaaacaaaaanaaaaaaaaaaantcacaccatngctcacagaattggcatctcattttngggacctcccatctttctgtttngaaaagtgtacagtagtgcagtgttcctgatgtaactttatggcttacaatgttgacatgtctcaggttcatgtgttncgattggtgttttccgtctcaggtagattgcaaagtgtaggccccacacattggaaaaaataataataaaacaaagcaaaaacaggaaattatggattttagttgtatattggtttatgtattttttcttaagtatacagtgcactgtttgaaatgtattgttgagtattactttgtacaggttgatcactttttttagagtgaagaaagaacaaacttgttttttgtgttttttaaaggaatataaaataatgaaggatgtataattgatgccaaataagcttgttctttagtcacaccgacgtcttatttttccctttaggccagttctgtttttaaggtgtacatggacaatgttacagtgtaagaaactccatatccatatgttcccattcgcattttgtattggttcatgtataccatttttacaaaaaaaaaaangaaaaaaaagaagtactataaaatatctgtcttcttaatnaaaaaaaaattaatgttanaaannnaaaaaaaaaaaaaaaaaaaaaaaaaaaaaaaaaaaaaaaaaaaaaaaaaaaaaaaaaaaaaaaaaaaaaaaaaaaaaaaaaaaaaaaaaaaaaaaaaaaaaaaaaaaaaaaaaaaaaaaaaaaaa

SEQ ID NO: 28 - DNA, 3989 bp, Homo sapiens
cccggttttactctcatttgggtaaggtcgaggctggctctggaagcagcaccatggttctgcggtctggcatctgtggcctctctccacatcggatcttcccttccttactcgtggtggttgctttggtggggctgctgcctgttctcaggagccatggcctccagctcagcccaactgccagcaccattcgaagctcagagccaccacgagaacgctcgattggggatgtcaccaccgctccaccggaggtcaccccagagagccgccctgttaatcattccgtcactgatcatggcatgaagccgcgcaaggcctttccagtcctgggcatcgactacacacacgtgcgcacccccttcgagatctccctctggatccttctggcctgcctcatgaagataggtttccatgtgatccccactatctcaagcatcgtcccggagagctgcctgctgatcgtggtggggctgctggtggggggcctgatcaagggtgtaggcgagacaccccccttcctgcagtccgacgtcttcttcctcttcctgctgccgcccatcatcctggatgcgggctacttcctgccactgcggcagttcacagaaaacctgggcaccatcctgatctttgccgtggtgggcacgctgtggaacgcctccttcctgggcggcctcatgtacgccgtgtgcctggtgggcggtgagcagatcaacaacatcggcctcctggacaacctgctcttcggcagcatcatctcggccgtggaccccgtggcggttctggctgtctttgaggaaattcacatcaatgagctgctgcacatccttgtttttggggagtccttgctcaatgacgccgtcactgtggtcctgtatcacctctttgaggagtttgccaactacgaacactgtggcatcgtggacatcttcctcggcttcctgagcttcttcgtggtggccctgggcggggtgcttgtgggcgtggtctacggggtcatcgcagccttcacctcccgatttacctcccacatccgggtcatcgagccgctcttcgtcttcctctacagctacatggcctacttgtcagccgagctcttccacctgtcaggcatcatggcgctcatagcctcaggagtggtgatgcgcccctatgtggaggccaacatctcccacaagtcccacaccaccatcaaatacttcctgaagatgtggagcagcgtcagcgagaccctcatcttcatcttcctcggcgtctccacggtggccggctcccaccactggaactggaccttcgtcatcagcaccctgctcttctgcctcatcgcccgcgtgctgggggtgctgggcctgacctggttcatcaacaagttccgtatcgtgaagctgacccccaaggaccagttcatcatcgcctatgggggcctgcgaggggccatcgccttctctctgggctacctcctggacaagaagcacttccccatgtgtgacctgttcctcactgccatcatcactgtcatcttcttcaccgtctttgtgcagggcatgaccattcggcccctggtagacctgttggctgtgaagaaaaagcaagagacgaagcgctccatcaacgaagagatccacacacagttcctggaccaccttctgacaggcatcgaagacatctgtggccactacggtcaccaccactggaaggacaagctcaaccggtttaataagaaatatgtgaagaagtgtctgatagctggcgagcgctccaaggagccccagctcattgccttctaccacaagatggagatgaagcaggccatcgagctggtggagagcgggggcatgggcaagatcccctctgccgtctccaccgtctccatgcagaacatccaccccaagtccctgccttccgagcgcatcctgccagcactgtccaaggacaacgaggaggagatccgcaaaatcctgaggaacaacttgcagaagaccaggcagcggctgcggtcctacaacagacacacgctggtggcagacccctacgaggaagcctggaaccagatgctgctccggaggcagaaggcccggcagctggagcagaagatcaacaactacctgacggtgccagcccacaagctggactcacccaccatgtctcgggcccgcatcggctcagacccactggcctatgagccgaaggaggacctgcctgtcatcaccatcgacccggcttccccgcagtcacccgagtctgtggacctggtgaatgaggagctgaagggcaaagtcttagggttgagccgggatcctgcaaaggtggctgaggaggacgaggacgacgatgggggcatcatgatgcggagcaaggagacttcgtccccaggaaccgacgatgtcttcacccccgcgcccagtgacagccccagctcccagaggatacagcgctgcctcagtgacccaggcccacaccctgagcctggggagggagaaccgtccttccccaaggggcagtaacgccagggccagcaggcagcgcctgtcccctcacagactcttccaccagagcaggggctgctgggggctccccttgcccttcctgacccggattggccctgcccctccccctaccgcatggcagctgggcccacagcccccaccccagcacagctcctcccctgccgcctcccgggaagcatcctccccaccagagctgcctccccaatccatttggcagaactgctggggctggtgaggccggccctgcccctccctagatccaggcttctcccggacctggactagggcctcggaggctcctccctctgcctcatcctcctcctcattcagaccaatcttagtttctaaccaaagagtctctggctcagctgtggtcccacccaggaagggagggagctgaggcctcccttgagtaggccctgctttatcaggggacaaaccaggggtaccaggcacatggctgggggagggactgctgacccaccaaggtctcacactcctcctgccagctctgtcaccctggccaccacccaacctgtccttactcagagctgcgggctgagggcatctctgagtgtctctgcctggagcaggggtggtttctacggtgacagtgacgtgactcagagcttttcgaactgtgctcccacggggaccactgggcccctcaggggaagctgctaggggaaggactggccgtggctccagaatgtgctgcctttttaagttttgtttgttcacactcctatatatgattgtttgcacagagggcgctcctgtttctaaaacattttgaaaacccctggctgaacagtgctctgcctctaactccctcctcacactccagaattacccttcctcatctgtgcctgtctgtccaacccctcccccacgtctctctgcctgctgggctcttaactgttgctgaagactgtgacatcagaagtaactcccactcctaatcaagagtctctccagcctcacagatgctggcctcttggcacctgcctagctcttgggcctgacctccagtcctgctggcctgctcttacttcccccaccctgggtttggcccctggaacctttcccttgtgtgtaccacaccctgcctgctgtggagcccattgtggaggcggtgggggggagaaggcctcccctgaggatcccctgtcccctggggctggtggattgggcagaatcctgggcccccagagacctttgcccacacacactccttccccttgtccctggggcactcccccaggattgtgcaatagtcagagtgtccctttttgcagggactgggccatggtcctcggcccatctgtccatcctcctctccatgcaagtgctgtttgggcaggagtcaccatgcaagggtgacatcgacaaccacgtaccaagccaccgcagctgcgccactctgctgcctgtacagaagaaactgaatctttttcatattctaataaatcaatgtgagttttt

SEQ ID NO: 29 - DNA, 1837 bp, Homo sapiens
  misc_feature (2)..(2): n is a, c, g, or t
  misc_feature (5)..(5): n is a, c, g, or t
  misc_feature (8)..(11): n is a, c, g, or t
  misc_feature (13)..(17): n is a, c, g, or t
  misc_feature (1096)..(1096): n is a, c, g, or t
  misc_feature (1102)..(1104): n is a, c, g, or t
  misc_feature (1148)..(1148): n is a, c, g, or t
  misc_feature (1279)..(1279): n is a, c, g, or t
  misc_feature (1390)..(1390): n is a, c, g, or t
  misc_feature (1392)..(1394): n is a, c, g, or t
  misc_feature (1396)..(1400): n is a, c, g, or t
  misc_feature (1402)..(1402): n is a, c, g, or t
  misc_feature (1405)..(1407): n is a, c, g, or t
  misc_feature (1413)..(1413): n is a, c, g, or t
  misc_feature (1643)..(1644): n is a, c, g, or t
  misc_feature (1740)..(1740): n is a, c, g, or t
  misc_feature (1782)..(1782): n is a, c, g, or t
tnttnttnnnntnnnnnttttttacacttcataaaaccatgtttattcaaaaaaatctattcagaaagtctggaaagcgtaataaatatctgtacagtggccacccatctcaaacatgaattacaaagcaggaacataaaaatgatgtgtaaacataactgctgagccagtgaacaaagtgctgagtcaggagcgaggcagagaagcgtgctcagtagaacgacacagatgctgcagcctccgtcctcagcccctcaagctgcgctggagtccaccttccgccctctccacaccgctcagggaccggcagcgtccttctccattctcgaatttgcatgacgcttagaaaggtaggaggcagcaaaacgtgtcagaaatgaacggagtgcaaatcaaactttgccatgtgcttgagagaatcagtaaagcgttaggtaaaaatcccaagtgcagctttaggataacaccatttaatgaacaatactggataacattaagtactattatcactttaaaattcaaacaatcttccaaacatcaatacatacacagttagtttaaaatcacagacaaatcggacttgagggtaaaagtgaaatcctcacctcttgcccatgtttgactttgggatggaattcagcaaagctctcccactgcagattgggagaatcaggtatttctcccacatggggggctgccagggaaggaggaccctatagggtggccagcaaggggccactggcggtaggtcaggaagcctgagatctagggttcaatgtgtttataagttctgtgattttcatgacccgggggtggggggttgggttatgatgaactgtgtgaggaaggagagccagttaacttttggggaggtctatgtcatttgtgcaaatcatacggagcatttcattcgttgtggaggtgcgctgagctggcaaaatgcgaattctaagaacaccttcatttacatgtcgactgctgcttgaaagcagtcacttgctatttcactaaggtttttgaaagcttagtttaacatatgataccataacttctttaggctgacttttgtggaaggatgtcaagtatcattttgttntggatnnnggagggaaagtagaggtatttcacagacactcagcggagcaggnccaagccagtgttctcctccgctgatgcacatcaaatacatgtaaggacagagctcgctgtgatggggagtctcgtcggtccctttggcattcttagagttcagaagctaagtctgtacaaactgggatgnctgaaaaagaccatgagctggtgccccatgggcacacaaggagggaaaaccgtggccgctttctcacggatgctttccctttcacttcccccacttctcactccctgcacnannncnnnnngnctnnnagcaancagacaggcctgcacaccaagccaggccaaagggtccgggcagctgatgggggaatcgttgcctgtgtagcaagcagaaaaggtgatgacttttgttcatttctgggaggacagattgtgtgacctcaggattatccacttcttcctaagtttctaaaaagaagtgaaataattaagacctaaaaagcaaattcatcatggtggaagtcgttctagccttgggaaaaagnnatcttctatggagaaaatgtgaggaataccctgtgggcactatggaaacaggtattcagtccgacttgctccttttatgttttgtggttctctaanaaaaaaaaatccacatggattaaagcttgtgaaacaagtttntattttaaggtctgaaaacaatcagaccaagctaaggagttatttttcagaacgc

SEQ ID NO: 30 - DNA, 4112 bp, Homo sapiens
caaggcgcctgcgactcggtcccaggtcggcgggcggcgcgcggcgggctcgcgcgggggccccggcgcgccgggcggcgcagtacgcagcgcgcggacccacgccacggccaggagcccagagcagcgcggccacactgcccaggggtcggccctcggccccggcgctcggagcgcggcggctgcctgggctttaatggctgctccgcggagcagcgcctagggctggaaggcggctgcggctcaggaagtcacccgagcaagcctccttcggggccggccgcacccgccgcggcgcgctccatgggggcgcgctccccccgggcggcccgctgacccgggacgccggggcccgctcgctcgccggccgcgcgtcccggccatgaactgagcccgcgggccagccccgcgcctgctccgcccgcgcctttcttctcgcgcctcctccgcccgccgccggcgggcccggctccccgggggctgcggcgccccgggctcggcggcccgcgggccccggggcgcggggcggcggcggcggggggcgcgcggctccgggcgcggcgcctgcaccatgaactaccagcagcagctggccaactcggctgccatccgggccgagatccagcgcttcgagtcggtccaccccaacatctactccatctacgagctgctggagcgcgtggaggagccggtgctgcagaaccagatccgggagcacgtcatcgccatcgaagatgccttcgtgaacagccaggaatggacgctgagtcgatctgtcccggagctcaaagtgggaattgtgggtaacttggccagcggcaagtctgccctggtgcaccggtacctgacgggcacatatgtccaggaggagtctccggaaggtggcaggttcaagaaagagattgtcgttgatggacagagctatctgctgctgatcagagatgaagggggccccccggaggcgcagtttgccatgtgggtggacgctgttatatttgtcttcagcttggaggatgaaataagtttccagaccgtttaccactactacagtcgaatggccaactatcggaacacgagcgagattcctctggttctggtgggaacccaggatgccataagttctgctaacccgagggtcatcgatgacgccagggcgaggaagctctccaacgacctgaaacggtgcacgtactacgagacgtgtgctacatacgggctgaatgtggagagggtcttccaggacgttgcccagaagattgttgccacaaggaagaagcagcagctgtccataggaccctgcaagtcgctacctaattctcccagccattcctccgtctgttccgcgcaggtgtctgccgtgcacatcagccagacaagtaatggaggtgggagtttaagcgactattcctcctccgttccatcgactcccagcatcagccagaaggaacttcggatcgatgttcctcccactgccaacacgcccacgcccgttcgcaagcagtctaagcgccggtccaacctgttcacctctcggaaagggagcgacccagacaaagagaagaaaggcctggagagtcgtgcggacagcattgggagcggccgagccatcccaattaaacagggcatgctgttgaagcgaagtggcaaatcgttgaataaagagtggaaaaagaaatatgtcaccctgtgtgacaatggcgtgctgacctatcatcccagtttacatgattacatgcagaatgttcatggtaaggagattgaccttctgagaaccactgtgaaagtcccagggaagaggccaccccgagccacgtcagcctgcgcacccatctccagccctaaaaccaatggcctatccaaggacatgagcagtttacacatctcacccaattcagacacagggctgggtgactccgtatgctccagccccagtatctccagcaccaccagccccaagctcgacccgcccccctcccctcacgccaacagaaagaagcaccgaaggaagaaaagcactagcaacttcaaagccgacggcctgtccggcactgctgaagaacaagaagaaaattttgagtttatcattgtgtccctcactggccaaacatggcactttgaagccacgacgtatgaggagcgggacgcctgggtccaagccatcgagagccagatcctggccagcctgcagtcgtgcgagagcagcaagaacaagtcccggctgacgagccagagcgaggccatggccctgcagtcgatccggaacatgcgcgggaactcccactgtgtggactgcgagacccagaatcccaactgggccagtttgaacttgggagccctcatgtgcatcgaatgctcagggatccaccggaatcttggcacccacctttcccgagtccgatctctggacctggatgactggccaatcgagctcatcaaggtgatgtcatccatcgggaacgagctagccaacagcgtctgggaagagagcagccaggggcggacgaaaccatcggtagactccacaagggaagagaaggaacggtggatccgtgccaagtacgagcagaagctcttcctggccccgctgccctgcacggagctgtccctgggccagcacctgctgcgggccaccgccgacgaggacctgcggacggccatcctgctgctggcacacggctcccgggacgaggtgaacgagacctgcggggagggagacggccgcacggcgctgcatctggcctgccgcaaggggaatgtggtcctggcgcagctcctgatctggtacggagtggacgtcacggcccgagatgcccacgggaacacagctctggcctacgcccggcaggcctccagccaggagtgcatcgacgtgctgctgcagtacggctgccccgacgagcgcttcgtgctcatggccacccctaacctgtccaggagaaacaataaccggaacaacagcagtgggagggtgcccaccatcatctgaggaacagccgtgcccgcctgctcgccgcacctgggacgcggcagcctcgccgcattctcgctcagaagtcgcagcacgtgagtcccgtcgcatcccctccctcttcctggtggccacctccctcccgcccacccactctcaccccaaacaaaatcacaaaacctggacatccctcaaggggcgaagaggcggccgggagactgcagaagtggctccttttcataaactcccctaaaccacacacaggagagagcgacgggcctcggccctttgatgatagcacatggcgcaggacccttgtcctggtggcacaagggatggggacgcgagggggaggggaggcgaggaacaaggagaaggggcaactttccttaactggcagttgagcacatagtacatttcccctctaccaaacggaacacttggattccatctcttctctgaggagctcgacggcataaatcagaagcaagcacagagtttgtcaggtttgaagcccctatgatggtgtgtgtcaaatcagttgtagctaatctgtccagggagaatactggcttcattacacttgtacagccgagttcttcccgcattactgctgtttaatagaacgtgattagtcatcgccgagaagaaagcatattagccgaggaggtagtcacgcggcacgcgccggtgattgccacgatgtgattgcaatactcttagaagcaccatattatcccagacatgttctttcaagcccttggagccctctctaaattcactgtcatcatttagtatctgtttaatttttcagtccaaagagaggaaatcagtcgctgagtattatttgactccggtctccttggtgcaaaaacaaaatgggaaaaataaataagaataactcagaaactcaaaaggaaaccacaaattcagctaataatagcatttcgagtatatttcgtaaactaaggaaatacacaaaaggctgtttttttccgactgtaagagatatttgatgtccttttgccgaggtggatgtgttagtctcaggccctcctggaccacgttgcccaagtcacacaggcttctgtgttatgtatttagataagatgtgtgaaaatatatttgaataaaagaagttcat

SEQ ID NO: 31 - DNA, 4099 bp, Homo sapiens
gggcagtcccctgaggagcggggctggttgaaacgctaggggcgggatctggcggagtggaagaaccgcggcaggggccaagcctcctcaactatgacctcaaccggccaggattccaccacaaccaggcagcgaagaagtaggcagaacccccagtcgccccctcaggactccagtgtcacttcgaagcgaaatattaaaaagggagccgttccccgctctatccccaatctagcggaggtaaagaagaaaggcaaaatgaagaagctcggccaagcaatggaagaagacctaatcgtgggactgcaagggatggatctgaaccttgaggctgaagcactggctggcactggcttggtgttggatgagcagttaaatgaattccattgcctctgggatgacagcttcccggaaggccctgagcggctccatgccatcaaggagcaactgatccaggagggcctcctagatcgctgcgtgtcctttcaggcccggtttgctgaaaaggaagagctgatgttggttcacagcctagaatatattgatctgatggaaacaacccagtacatgaatgagggagaactccgtgtcctagcagacacctacgactcagtttatctgcatccgaactcatactcctgtgcctgcctggcctcaggctctgtcctcaggctggtggatgcggtcctgggggctgagatccggaatggcatggccatcattaggcctcctggacatcacgcccagcacagtcttatggatggctattgcatgttcaaccacgtggctgtggcagcccgctatgctcaacagaaacaccgcatccggagggtccttatcgtagattgggatgtgcaccacggtcaaggaacacagttcaccttcgaccaggaccccagtgtcctctatttctccatccaccgctacgagcagggtaggttctggccccacctgaaggcctctaactggtccaccacaggtttcggccaaggccaaggatataccatcaatgtgccttggaaccaggtggggatgcgggatgctgactacattgctgctttcctgcacgtcctgctgccagtcgccctcgagttccagcctcagctggtcctggtggctgctggatttgatgccctgcaaggggaccccaagggtgagatggccgccactccggcagggttcgcccagctaacccacctgctcatgggtctggcaggaggcaagctgatcctgtctctggagggtggctacaacctccgcgccctggctgaaggcgtcagtgcttcgctccacacccttctgggagacccttgccccatgctggagtcacctggtgccccctgccggagtgcccaggcttcagtttcctgtgctctggaagcccttgagcccttctgggaggttcttgtgagatcaactgagaccgtggagagggacaacatggaggaggacaatgtagaggagagcgaggaggaaggaccctgggagccccctgtgctcccaatcctgacatggccagtgctacagtctcgcacagggctggtctatgaccaaaatatgatgaatcactgcaacttgtgggacagccaccaccctgaggtaccccagcgcatcttgcggatcatgtgccgtctggaggagctgggccttgccgggcgctgcctcaccctgacaccgcgccctgccacagaggctgagctgctcacctgtcacagtgctgagtacgtgggtcatctccgggccacagagaaaatgaaaacccgggagctgcaccgtgagagttccaactttgactccatctatatctgccccagtaccttcgcctgtgcacagcttgccactggcgctgcctgccgcctggtggaggctgtgctctcaggagaggttctgaatggtgctgctgtggtgcgtcccccaggacaccacgcagagcaggatgcagcttgcggtttttgctttttcaactctgtggctgtggctgctcgccatgcccagactatcagtgggcatgccctacggatcctgattgtggattgggatgtccaccacggtaatggaactcagcacatgtttgaggatgaccccagtgtgctatatgtgtccctgcaccgctatgatcatggcaccttcttccccatgggggatgagggtgccagcagccagatcggccgggctgcgggcacaggcttcaccgtcaacgtggcatggaacgggccccgcatgggtgatgctgactacctagctgcctggcatcgcctggtgcttcccattgcctacgagtttaacccagaactggtgctggtctcagctggctttgatgctgcacggggggatccgctggggggctgccaggtgtcacctgagggttatgcccacctcacccacctgctgatgggccttgccagtggccgcattatccttatcctagagggtggctataacctgacatccatctcagagtccatggctgcctgcactcgctccctccttggagacccaccacccctgctgaccctgccacggcccccactatcaggggccctggcctcaatcactgagaccatccaagtccatcgcagatactggcgcagcttacgggtcatgaaggtagaagacagagaaggaccctccagttctaagttggtcaccaagaaggcaccccaaccagccaaacctaggttagctgagcggatgaccacacgagaaaagaaggttctggaagcaggcatggggaaagtcacctcggcatcatttggggaagagtccactccaggccagactaactcagagacagctgtggtggccctcactcaggaccagccctcagaggcagccacagggggagccactctggcccagaccatttctgaggcagccattgggggagccatgctgggccagaccacctcagaggaggctgtcgggggagccactccggaccagaccacctcagaggagactgtgggaggagccattctggaccagaccacctcagaggatgctgttgggggagccacgctgggccagactacctcagaggaggctgtaggaggagctacactggcccagaccacctcggaggcagccatggagggagccacactggaccagactacgtcagaggaggctccagggggcaccgagctgatccaaactcctctagcctcgagcacagaccaccagacccccccaacctcacctgtgcagggaactacaccccagatatctcccagtacactgattgggagtctcaggaccttggagctaggcagcgaatctcagggggcctcagaatctcaggccccaggagaggagaacctactaggagaggcagctggaggtcaggacatggctgattcgatgctgatgcagggatctaggggcctcactgatcaggccatattttatgctgtgacaccactgccctggtgtccccatttggtggcagtatgccccatacctgcagcaggcctagacgtgacccaaccttgtggggactgtggaacaatccaagagaattgggtgtgtctctcttgctatcaggtctactgtggtcgttacatcaatggccacatgctccaacaccatggaaattctggacacccgctggtcctcagctacatcgacctgtcagcctggtgttactactgtcaggcctatgtccaccaccaggctctcctagatgtgaagaacatcgcccaccagaacaagtttggggaggatatgccccacccacactaagccccagaatacggtccctcttcaccttctgaggcccacgatagaccagctgtagctcattccagcctgtaccttggatgaggggtagcctcccactgcatcccatcctgaatatcctttgcaactccccaagagtgcttatttaagtgttaatacttttaagagaactgcgacgattaattgtggatctccccctgcccattgcctgcttgaggggcaccactactccagcccagaaggaaaggggggcagctcagtggccccaagagggagctgatatcatgaggataacattggcgggaggggagttaactggcaggcatggcaaggttgcatatgtaataaagtacaagctgtt

SEQ ID NO: 32 - DNA, 2554 bp, Homo sapiens
  misc_feature (2044)..(2044): n is a, c, g, or t
  misc_feature (2054)..(2054): n is a, c, g, or t
  misc_feature (2079)..(2079): n is a, c, g, or t
  misc_feature (2093)..(2093): n is a, c, g, or t
  misc_feature (2111)..(2111): n is a, c, g, or t
  misc_feature (2140)..(2140): n is a, c, g, or t
  misc_feature (2151)..(2151): n is a, c, g, or t
  misc_feature (2160)..(2160): n is a, c, g, or t
ggaacggggcagtcccctgaggagcggggctggttgaaacgctaggggcgggatctggcggagtggaagaaccgcggcaggggccaagcctcctcaactatgacctcaaccggccaggattccaccacaaccaggcagcgaagaagtaggcagaacccccagtcgccccctcaggactccagtgtcacttcgaagcgaaatattaaaaagggagccgttccccgctctatccccaatctagcggaggtaaagaagaaaggcaaaatgaagaagctcggccaagcaatggaagaagacctaatcgtgggactgcaagggatggatctgaaccttgaggctgaagcactggctggcactggcttggtgttggatgagcagttaaatgaattccattgcctctgggatgacagcttcccggaaggccctgagcggctccatgccatcaaggagcaactgatccaggagggcctcctagatcgctgcgtgtcctttcaggcccggtttgctgaaaaggaagagctgatgttggttcacagcctagaatatattgatctgatggaaacaacccagtacatgaatgagggagaactccgtgtcctagcagacacctacgactcagtttatctgcatccgaactcatactcctgtgcctgcctggcctcaggctctgtcctcaggctggtggatgcggtcctgggggctgagatccggaatggcatggccatcattgggcctcctggacatcacgcccagcacagtcttatggatggctattgcatgttcaaccacgtggctgtggcagcccgctatgctcaacagaaacaccgcatccggagggtccttatcgtagattgggatgcgcaccacggtcaaggaacacagttcaccttcgaccaggaccccagtgtcctctatttctccatccaccgctacgagcagggtaggttctggccccacctgaaggcctctaactggtccaccacaggtttcggccaaggccaaggatataccatcaatgtgccttggaaccaggtggggatgcgggatgctgactacattgctgctttcctgcacgtcctgctgccagtcgccctcgagttccagcctcagctggtcctggtggctgctggatttgatgccccgcaaggggaccccaagggtgagatggccgccactccggcagggttcgcccagctaacccacctgctcatgggtctggcaggaggcaagctgatcctgtctctggagggtggctacaacctccgcgccctggctgaaggcgtcagtgcttcgctccacacccttctgggagacccttgccccatgctggagtcacctggtgccccctgccggagtgcccaggcttcagtttcctgtgctctggaagcccctgagcccttctgggaggttcttgtgagatcaactgagaccgtggagagggacaacatggaggaggacaatgtagaggagagcgaggaggaaggaccctgggagccccctgtgctcccaatcctgacatggccagtgctacagtctcgcacagggctggtctatgaccaaaatatgatgaatcactgcaacttgtgggacagccaccaccctgaggtaccccagcgcatcttgcggatcatgtgccgtctggaggagctgggccttgccgggcgctgcctcaccctgacaccgcgccctgccacagaggctgagctgctcacctgtcacagtgctgagtacgtgggtcatctccgggccacagagaaaatgaaaacccgggagctgcaccgtgagagttccaactttgactccatctatatctgccccagtaccttcgcctgtgcacagcttgccactggcgctgcctgccgcctggtggaggctgtgctctcaggagaggttctgaatggtgctgctgtggtgcgtcccccaggacaccacgcagagcaggatgcagcttgcggtttttgctttttcaactctgtggctgtggctgctcgccatgcccagactatcagtgggcatgccctacggatcctgattgtggattggnatgtccaccncggtaatggaactcagcacatgttngaggatgaccccangtgtgctatatgtgtccntgcaccgctatgatcatggcaccttcttnccccatggggnatgagggtnccagcagccagatcggccgggctgcgggcacaggcttcaccgtcaacgtggcatggaacgggccccgcatgggtgatgctgactacctagctgcctggcatcgcctggtgcttcccattgcctacgagtttaacccaaaactggtgctggtctcagctggctttgatgctgcacggggggatccgctggggggctgccaggtgtcacctgagggttatgcccacctcaccctgcccattgcctgcttgaggggcaccactactccagcccagaaggaaaggggggcagctcagtggccccaagagggagctgatatcatgaggataacattggcgggaggggagttaactggcaggcatggcaaggttgcatatgtaataaagtacaagctgtt

SEQ ID NO: 33 - DNA, 662 bp, Homo sapiens
gggggggggagcacaaagttgggagtgacaccagagcctcctgcaagatgcttctgattctgctgtcagtggccctgctggccttcagctcagctcaggatttaaatgaagatgtcagccaggaagatgttcccctcgtaatatcagatggaggagactctgagcagttcatagatgaggagcgtcagggaccacctttgggaggacagcaatctcaaccctctgctggtgatgggaaccaggatgatggccctcagcagggaccaccccaacaaggaggccagcagcaacaaggtccaccacctcctcagggaaagccacaaggaccaccccaacagggaggccatccccctcctcctcaaggaaggccacaaggaccaccccaacagggaggccatccccgtcctcctcgaggaaggccacaaggaccaccccaacagggaggccatcagcaaggtcctcccccacctcctcctggaaagccccagggaccacctccccaagggggccgcccacaaggacctccacaggggcagtctcctcagtaatccaggattcaatgacaggaagtgaataagaagataacagtgtttcaaatgccgtgaaacatggcatcatgctctaacttcagtataccaataaaacaatcagcttgcaatttc

SEQ ID NO: 34 - DNA, 854 bp, Homo sapiens
gctccaccaatcacagggcagcgccggcttatataagcccggggcccgagcatagcagcaacgcaaaacctgctctttagatttcgagcttattctcttctagcagtttcttgccaccatgtcggaaaccgctcctgccgagacagccaccccagcgccggtggagaaatccccggctaagaagaaggcaactaagaaggctgccggcgccggcgctgctaagcgcaaagcgacggggcccccagtctcagagctgatcaccaaggctgtggctgcttctaaggagcgcaatggcctttctttggcagcccttaagaaggccttagcggccggtggctacgacgtggagaagaataacagccgcattaagctgggcctcaagagcttggtgagcaagggcaccctggtgcagaccaagggcactggtgcttctggctcctttaaactcaacaagaaggcggcctccggggaagccaagcccaaagccaagaaggcaggcgccgctaaagctaagaagcccgcgggggccacgcctaagaaggccaagaaggctgcaggggcgaaaaaggcagtgaagaagactccgaagaaggcgaagaagcccgcggcggctggcgtcaaaaaggtggcgaagagccctaagaaggccaaggccgctgccaaaccgaaaaaggcaaccaagagtcctgccaagcccaaggcagttaagccgaaggcggcaaagcccaaagccgctaagcccaaagcagcaaaacctaaagctgcaaaggccaagaaggcggctgccaaaaagaagtaggaagctggcgtgtgaaaaccgcaacaaagccccaaaggctcttttcagagccacc

SEQ ID NO: 35 - DNA, 4414 bp, Homo sapiens
ccgcgctctctgatcagaggcgaagctcggaggtcctacaggtatggatctctggcagctgctgttgaccttggcactggcaggatcaagtgatgctttttctggaagtgaggccacagcagctatccttagcagagcaccctggagtctgcaaagtgttaatccaggcctaaagacaaattcttctaaggagcctaaattcaccaagtgccgttcacctgagcgagagactttttcatgccactggacagatgaggttcatcatggtacaaagaacctaggacccatacagctgttctataccagaaggaacactcaagaatggactcaagaatggaaagaatgccctgattatgtttctgctggggaaaacagctgttactttaattcatcgtttacctccatctggataccttattgtatcaagctaactagcaatggtggtacagtggatgaaaagtgtttctctgttgatgaaatagtgcaaccagatccacccattgccctcaactggactttactgaacgtcagtttaactgggattcatgcagatatccaagtgagatgggaagcaccacgcaatgcagatattcagaaaggatggatggttctggagtatgaacttcaatacaaagaagtaaatgaaactaaatggaaaatgatggaccctatattgacaacatcagttccagtgtactcattgaaagtggataaggaatatgaagtgcgtgtgagatccaaacaacgaaactctggaaattatggcgagttcagtgaggtgctctatgtaacacttcctcagatgagccaatttacatgtgaagaagatttctactttccatggctcttaattattatctttggaatatttgggctaacagtgatgctatttgtattcttattttctaaacagcaaaggattaaaatgctgattctgcccccagttccagttccaaagattaaaggaatcgatccagatctcctcaaggaaggaaaattagaggaggtgaacacaatcttagccattcatgatagctataaacccgaattccacagtgatgactcttgggttgaatttattgagctagatattgatgagccagatgaaaagactgaggaatcagacacagacagacttctaagcagtgaccatgagaaatcacatagtaacctaggggtgaaggatggcgactctggacgtaccagctgttgtgaacctgacattctggagactgatttcaatgccaatgacatacatgagggtacctcagaggttgctcagccacagaggttaaaaggggaagcagatctcttatgccttgaccagaagaatcaaaataactcaccttatcatgatgcttgccctgctactcagcagcccagtgttatccaagcagagaaaaacaaaccacaaccacttcctactgaaggagctgagtcaactcaccaagctgcccatattcagctaagcaatccaagttcactgtcaaacatcgacttttatgcccaggtgagcgacattacaccagcaggtagtgtggtcctttccccgggccaaaagaataaggcagggatgtcccaatgtgacatgcacccggaaatggtctcactctgccaagaaaacttccttatggacaatgcctacttctgtgaggcagatgccaaaaagtgcatccctgtggctcctcacatcaaggttgaatcacacatacagccaagcttaaaccaagaggacatttacatcaccacagaaagccttaccactgctgctgggaggcctgggacaggagaacatgttccaggttctgagatgcctgtcccagactatacctccattcatatagtacagtccccacagggcctcatactcaatgcgactgccttgcccttgcctgacaaagagtttctctcatcatgtggctatgtgagcacagaccaactgaacaaaatcatgccttagcctttctttggtttcccaagagctacgtatttaatagcaaagaattgactggggcaataacgtttaagccaaaacaatgtttaaaccttttttgggggagtgacaggatggggtatggattctaaaatgccttttcccaaaatgttgaaatatgatgttaaaaaaataagaagaatgcttaatcagatagatattcctattgtgcaatgtaaatattttaaagaattgtgtcagactgtttagtagcagtgattgtcttaatattgtgggtgttaatttttgatactaagcattgaatggctatgtttttaatgtatagtaaatcacgctttttgaaaaagcgaaaaaatcaggtggcttttgcggttcaggaaaattgaatgcaaaccatagcacaggctaattttttgttgtttcttaaataagaaacttttttatttaaaaaactaaaaactagaggtgagaaatttaaactataagcaagaaggcaaaaatagtttggatatgtaaaacatttactttgacataaagttgataaagattttttaataatttagacttcaagcatggctattttatattacactacacactgtgtactgcagttggtatgacccctctaaggagtgtagcaactacagtctaaagctggtttaatgttttggccaatgcacctaaagaaaaacaaactcgttttttacaaagcccttttatacctccccagactccttcaacaattctaaaatgattgtagtaatctgcattattggaatataattgttttatctgaatttttaaacaagtatttgttaatttagaaaactttaaagcgtttgcacagatcaacttaccaggcaccaaaagaagtaaaagcaaaaaagaaaacctttcttcaccaaatcttggttgatgccaaaaaaaaatacatgctaagagaagtagaaatcatagctggttcacactgaccaagatacttaagtgctgcaattgcacgcggagtgagttttttagtgcgtgcagatggtgagagataagatctatagcctctgcagcggaatctgttcacacccaacttggttttgctacataattatccaggaagggaataaggtacaagaagcattttgtaagttgaagcaaatcgaatgaaattaactgggtaatgaaacaaagagttcaagaaataagtttttgtttcacagcctataaccagacacatactcatttttcatgataatgaacagaacatagacagaagaaacaaggttttcagtccccacagataactgaaaattatttaaaccgctaaaagaaactttctttctcactaaatcttttataggatttatttaaaatagcaaaagaagaagtttcatcattttttacttcctctctgagtggactggcctcaaagcaagcattcagaagaaaaagaagcaacctcagtaatttagaaatcattttgcaatcccttaatatcctaaacatcattcatttttgttgttgttgttgttgttgagacagagtctcgctctgtcgccaggctagagtgcggtggcgcgatcttgactcactgcaatctccacctcccacaggttcaggcgattcccgtgcctcagcctcctgagtagctgggactacaggcacgcaccaccatgccaggctaatttttttgtattttagcagagacggggtttcaccatgttggccaggatggtctcgagtctcctgacctcgtgatccacccgactcggcctcccaaagtgctgggattacaggtgtaagccaccgtgcccagccctaaacatcattcttgagagcattgggatatctcctgaaaaggtttatgaaaaagaagaatctcatctcagtgaagaatacttctcattttttaaaaaagcttaaaactttgaagttagctttaacttaaatagtatttcccatttatcgcagaccttttttaggaagcaagcttaatggctgataattttaaattctctctcttgcaggaaggactatgaaaagctagaattgagtgtttaaagttcaacatgttatttgtaatagatgtttgatagattttctgctactttgctgctatggttttctccaagagctacataatttagtttcatataaagtatcatcagtgtagaacctaattcaattcaaagctgtgtgtttggaagactatcttactatttcacaacagcctgacaacatttctatagccaaaaatagctaaatacctcaatcagtctcagaatgtcattttggtactttggtggccacataagccattattcactagtatgactagttgtgtctggcagtttatatttaactctctttatgtctgtggattttttccttcaaagtttaataaatttattttcttggattcctgataatgtgcttctgttatcaaacaccaacataaaaatgatctaaacc

SEQ ID NO: 36 - DNA, 3387 bp, Homo sapiens
agggccacaggtgctgccaagatgctccagggcacctgctccgtgctcctgctctggggaatcctgggggccatccaggcccagcagcaggaggtcatctcgccggacactaccgagagaaacaacaactgcccagagaagaccgactgccccatccacgtgtacttcgtgctggacacctcggagagcgtcaccatgcagtcccccacggacatcctgctcttccacatgaagcagttcgtgccgcagttcatcagccagctgcagaacgagttctacctggaccaggtggcgctgagctggcgctacggcggcctgcacttctctgaccaggtggaggtgttcagcccaccgggcagcgaccgggcctccttcatcaagaacctgcagggcatcagctccttccgccgcggcaccttcaccgactgcgcgctggccaacatgacggagcagatccggcaggaccgcagcaagggcaccgtccacttcgccgtggtcatcaccgacggccacgtcaccggcagcccctgcgggggcatcaagctgcaggccgagcgggcccgcgaggagggcatccggctcttcgccgtggcccccaaccagaacctgaaggagcagggcctgcgggacatcgccagcacgccgcacgagctctaccgcaacgactacgccaccatgctgcccgactccaccgagatcaaccaggacaccatcaaccgcatcatcaaggtcatgaaacacgaagcctacggagagtgctacaaggtgagctgcctggaaatccctgggccctctgggcccaagggctaccgtggacagaagggtgccaagggcaacatgggtgagccgggagagcctggccagaagggaagacagggagacccgggcatcgaaggccccattggattcccaggacccaagggcgttcctggcttcaaaggagagaagggtgaatttggagccgacggtcgcaagggggcccctggcctggctggcaagaacgggaccgatggacagaagggcaagctggggcgcatcggacctcctggctgcaagggagaccctggaaaccggggccccgacggttacccgggggaagcagggagtccaggggagcgaggagaccaaggcggcaagggggaccctggccgcccaggacgcagagggcccccgggagaaatcggggccaagggaagcaaggggtatcaaggcaacaatggagccccaggaagtcctggtgtgaaaggagccaagggcgggcctgggccccgcggacccaaaggcgagccggggcgcaggggagaccccggcaccaagggcagcccaggcagcgatggccccaagggggagaagggggaccctggccctgagggcccccgcggcctggctggagaggttggcaacaaaggagccaagggagaccgaggcttgcctggacccagaggcccccagggagctcttggggagcccggaaagcagggatctcggggagaccccggtgatgcaggaccccgtggagactcaggacagccaggccccaagggagaccccggcaggcctggattcagctacccaggaccccgaggagcacccggagaaaaaggcgagcccggcccacgcggccccgagggaggccgaggcgactttggcttgaaaggagaacctgggaggaaaggagagaaaggagagcctgcggatcctggtccccctggtgagccaggccctcgggggccaagaggagtcccaggacccgagggtgagcccggcccccctggagaccccggtctcacggagtgtgacgtcatgacctacgtgagggagacctgcgggtgctgcgactgtgagaagcgctgtggcgccctggacgtggtcttcgtcatcgacagctccgagagcattgggtacaccaacttcacactggagaagaacttcgtcatcaacgtggtcaacaggctgggtgccatcgctaaggaccccaagtccgagacagggacgcgtgtgggcgtggtgcagtacagccacgagggcacctttgaggccatccagctggacgacgaacatatcgactccctgtcgagcttcaaggaggctgtcaagaacctcgagtggattgcgggcggcacctggacaccctcagccctcaagtttgcctacgaccgcctcatcaaggagagccggcgccagaagacacgtgtgtttgcggtggtcatcacggacgggcgccacgaccctcgggacgatgacctcaacttgcgggcgctgtgcgatcgcgacgtcacagtgacggccatcggcatcggggacatgttccacgagaagcacgagagtgaaaacctctactccatcgcctgcgacaagccacagcaggtgcgcaacatgacgctgttctccgacctggtcgctgagaagttcatcgatgacatggaggacgtcctctgcccggaccctcagatcgtgtgcccagaccttccctgccaaacagagctgtccgtggcacagtgcacgcagcggcccgtggacatcgtcttcctgctggacggctccgagcggctgggtgagcagaacttccacaaggcccggcgcttcgtggagcaggtggcgcggcggctgacgctggcccggagggacgacgaccctctcaacgcacgcgtggcgctgctgcagtttggtggccccggcgagcagcaggtggccttcccgctgagccacaacctcactgccatccacgaggcgctggagaccacacaatacctgaactccttctcgcacgtgggcgcaggcgtggtgcacgccatcaatgccatcgtgcgcagcccgcgtggcggggcccggaggcacgcagagctgtccttcgtgttcctcacggacggcgtcacgggcaacgacagtctgcacgagtcggcgcactccatgcgcaacgagaacgtggtacccaccgtcctggccttgggcagcgacgtggacatggacgtgctcaccacgctcagcctgggtgaccgcgccgccgtgttccacgagaaggactatgacagcctggcgcaacccggcttcttcgaccgcttcatccgctggatctgctagcgccgccgcccgggccccgcagtcgagggtcgtgagcccaccccgtccatggtgctaagcgggcccgggtcccacacggccagcaccgctgctcactcggacgacgccctgggcctgcacctctccagctcctcccacggggtccccgtagccccggcccccgcccagccccaggtctccccaggccctccgcaggctgcccggcctccctccccctgcagccatcccaaggctcctgacctacctggcccctgagctctggagcaagccctgacccaataaaggctttgaacccaaaaaaaaaaa

SEQ ID NO: 37 - DNA, 2766 bp, Homo sapiens
  misc_feature (251)..(251): n is a, c, g, or t
  misc_feature (254)..(254): n is a, c, g, or t
  misc_feature (259)..(259): n is a, c, g, or t
  misc_feature (291)..(291): n is a, c, g, or t
  misc_feature (297)..(297): n is a, c, g, or t
  misc_feature (328)..(328): n is a, c, g, or t
  misc_feature (346)..(346): n is a, c, g, or t
  misc_feature (545)..(545): n is a, c, g, or t
  misc_feature (663)..(663): n is a, c, g, or t
  misc_feature (840)..(840): n is a, c, g, or t
  misc_feature (1253)..(1253): n is a, c, g, or t
  misc_feature (2309)..(2309): n is a, c, g, or t
  misc_feature (2761)..(2761): n is a, c, g, or t
tcttggcagctctaatatctgcatgttcagaaaggattctgaggctaaggcaaagctctgtgggacaaagggactggaccaaaaaaaaaaaaaaaaactggatggtggcacccaagacgaggaaatgatgagatgtgtacttctatctctggttaggcttagtccccactagacaaattgattttaaatactatgtagtgattttaaaatcccatccacacattcattacccacacagataatcatagaanttnggggnagtgcctagcttctgatgaagtggtgatatgncagttnccaagcagtggcatcgccagagtatctgttnggttagcaaatgagcagncattttaggtcatgcagattgctgatatctgcccagtagccactgagcatttgctggttttttcttctggctttcttggaggttaagctctctgtagtcatacccagttggtacttgatctttagcaatatgtctcatattcatgtaaattgaagggagggttacatgtactgaaataatctgcatgctaggcattggncttagacaccgtacctatctcacttagatttgtggactaggaaagcaagattcagagatcatgtgacttgcatgtggcctagagataaaattcaaatctggttctgtagactccaggnacatattcaccatgccatgggtggtggctattaaaccttgataaatttgtgtttatggttaacaaatgtgaaagctattaaacattgctggtttgaattttttacagtgcagaaatgtaaaatgaaaaaggatatttcctttcacagtgttaccgagaagtcatgataatttcgttngttcttccagatttaggcatatacttatttaatcaataatgtgttaacagctgacacctgtggttgctgtgacaggcactatttgaagtgctttatcatggattaactcttaatcctcagctaccgtataaagtaggacataaccccatttcacatgcactacactgagacttgcctcctctccccccacattgaagatgttcttttttcataactatatactattccattgcatgaatattctgtaatttatttaatcccctatggattgataattaggttcattatagatagaagtgtaattaacattcctgtacatgtattttgctacttgtgtgggtatttctgtaggatgaataactagaaatttattggatcaggtttcacatttgcagttttgaaaactactaccnaaaagatttcaccaatttacaactccatcattagtaagaatgcctgtttgcctatagtctgccaaccctgaatccttaaaaatttttgccaatctggtaggcaaaatttctttcttttctttgaatattaatgaggaggaacatcttttcatgtttcttggccatttgcatttcctattatgaattgcttttgcccattttcctttttttaattatgaaagtctaatgactaccttctcattgtataaaaaacacagttctttgaatagagagacccttttctccaatgctaccaatcacattccacttaccacagtttaacatacatcctctagtcacctttccgtacgaatatacatacacataaaaacactttttacataaataggatctcatattctgtagctttttaaaattttggtctcaaaaaaagataacaggtctttaaatttctttaatggttgaatatgattaaatactatgaaaatgccattatttattcccttaatttttttcctctcgctattacattgccaaagtaaacatcctattcagatgtctttgtgcatgtgtgtgaatatttctttagtctggagtccagtaaggtggatttttggatcaaagggtttgttctctgtccaccttcagtcttcccaaaggccttcataactgtattttcaccaagtgtatggagaatgttcatttccccatataaccatacctacacttgatagtttttatctgttgggcgaaaaagaaccttttcttattttgcatttccctgattataaaaaaaaatggtgagattggggttattttcatgtttattggccatttatagtttactgtggattgtttgtatcccttacctgctttctattgggttatgtgtggatatattgtttttatttgttcagcatctccttccccatcttctggtaacacaacctttatttatttgtggggaacctattccctgtggcttaggtgagcatgtgaccaggcctggcctcctgagtcccacagcttcctagccacagtgataaaagaatgggntatataacttaagccaggctaaggaaagcccttaacagaacttctgctggaactactggaaagaaggctttatggagatcccaggaaccaaggaccatgtaagcctgaatttgtgccatgtggagagagtctgtctgaggagaaactcggatgctagcagaaatggaaagagaactaagttctgatgtcatttttctggaggccctagatccagctgtgcctaaagcctgccctacctccggactttaaagttttgtgagccaataaagtccctttcttgtttaagataattgaattgagtttctgttctgattaatataggttatttgtattttcttattgatttgtagaaaacctttgtaattttaaattctagactttatgcactatataagttaataaaattagcatggccttccatgaaaaaaaaaaaaaaaaaaaaaaaaaaaaanaaaaa

SEQ ID NO: 38 - DNA, 1020 bp, Homo sapiens
ccatggcaggtcgctcctgcagtattagttcttgcagctggtggcggcggctgaggcggcatggatctcagcgagctggagagagacaatacaggccgctgtcgcctgagttcgcctgtgcccgcggtgtgccgcaaggagccttgcgtcctgggcgtcgatgaggcgggcaggggccccgtgctgggccccatggtctacgccatctgttattgtcccctgcctcgcctggcagatctggaggcgctgaaagtggcagactcaaagaccctattggagagcgagcgggaaaggctgtttgcgaaaatggaggacacggactttgtcggctgggcgctggatgtgctgtctccaaacctcatctctaccagcatgcttgggcgggtcaaatacaacctgaactccctgtcacatgatacagccactgggcttatacagtatgcattggaccagggcgtgaacgtcacccaggtattcgtggacaccgtagggatgccagagacataccaggcgcagctgcagcaaagttttcccgggattgaggtgacggtcaaggccaaagcagatgccctctacccggtggttagtgctgccagcatctgtgccaaggtggcccgggaccaggccgtgaagaaatggcagttcgtggagaaactgcaggacttggatactgattatggctcaggctaccccaatgatcccaagacaaaagcgtggttgaaggagcacgtggagcctgtgttcggcttcccccagtttgtccggttcagctggcgcacggcccagaccatcctggagaaagaggcggaagatgttatatgggaggactcagcatccgagaatcaggagggactcaggaagatcacatcctacttcctcaatgaagggtcccaagcccgtccccgttcttcccaccgatatttcctggaacgcggcctggagtcagcaaccagcctctagcagctgcctctacgcgctctacctgcttccccaacccagacattaaaattgtttaaggag

SEQ ID NO: 39 - DNA, 2919 bp, Homo sapiens
tctgtgattgtggccaggcggggcaccctcggaggggagggttcggaagtggaatgcgaccccccagcctctttcccctaggggctgtaatctgatccctggggactccccccctagcctcccgccctcgccctcactgctgactcctcttccagatcctggggcagagtccagggcagctcaaggctcctccacacacacacccgctgaaccctgagcaccctgagctgctgagatggggcgggccggggctgccgccgtgatcccgggcctggccctgctctgggcagtggggctggggagtgccgcccccagccccccacgccttcggctctccttccaagagctccaggcctggcatggtctccagactttcagcctggagcgaacctgctgctaccaggccttgctggtggatgaggagcgtggacgcctgtttgtgggtgccgagaaccatgtggcctccctcaacctggacaacatcagcaagcgggccaagaagctggcctggccggcccctgtggaatggcgagaggagtgcaactgggcagggaaggacattggtactgagtgcatgaacttcgtgaagttgctgcatgcctacaaccgcacccatttgctggcctgtggcacgggagccttccacccaacctgtgcctttgtggaagtgggccaccgggcagaggagcccgtcctccggctggacccaggaaggatagaggatggcaaggggaagagtccttatgaccccaggcatcgggctgcctccgtgctggtgggggaggagctatactcaggggtggcagcagacctcatgggacgagactttaccatctttcgcagcctagggcaacgtccaagtctccgaacagagccacacgactcccgctggctcaatgagcccaagtttgtcaaggtattttggatcccggagagcgagaacccagacgacgacaaaatctacttcttctttcgtgagacggcggtagaggcggcgccggcactgggacgcctgtccgtgtcccgcgttggccagatctgccggaacgacgtgggcggccagcgcagcctggtcaacaagtggacgacgttcctgaaggcgcggctggtgtgctcggtgcccggcgtcgagggcgacacccacttcgatcagctccaggatgtgtttctgttgtcctcgcgggaccaccggaccccgctgctctatgccgtcttctccacgtccagcagcatcttccagggctctgcggtgtgcgtgtacagcatgaacgacgtgcgccgggccttcttgggaccctttgcacacaaggaggggcccatgcaccagtgggtgtcataccagggtcgcgtcccctacccgcggccaggcatgtgccccagcaagacctttggcaccttcagttccaccaaggacttcccagacgatgtcatccagtttgcgcggaaccaccccctcatgtacaactctgtcctgcccactggggggcgccctcttttcctacaagttggagccaattacaccttcactcaaattgccgcggaccgggttgcagccgctgacggacactatgacgtcctcttcattggcacagacgttggcacggtgctgaaggtgatctcggtccccaagggcagtaggcccagcgcagaggggctgctcctggaggagctgcacgtgtttgaggactcggccgctgtcaccagcatgcaaatttcttccaagaggcaccagctgtacgtagcctcgcggagcgcggtggcccagatcgcgttgcaccgctgcgctgcccacggccgcgtctgcaccgaatgctgtctggcgcgtgacccctactgcgcctgggacggggtcgcgtgcacgcgcttccagcccagtgccaagaggcggttccggcggcaagacgtaaggaatggcgaccccagcacgttgtgctccggagactcgtctcgtcccgcgctgctggaacacaaggtgttcggcgtggagggcagcagcgcctttctggagtgtgagccccgctcgctgcaggcgcgcgtggagtggactttccagcgcgcaggggtgacagcccacacccaggtgctggcagaggagcgcaccgagcgcaccgcccggggactactgctgcgcaggctgcggcgccgggactcgggcgtgtacttgtgcgccgccgtcgagcagggctttacgcaaccgctgcgtcgcctgtcgctgcacgtgttgagtgctacgcaggccgaacgactggcgcgggccgaggaggctgcgcccgccgcgccgccgggccccaaactctggtaccgggactttctgcagctggtggagccgggcggaggtggcagcgcgaactccctgcgcatgtgccgcccgcagcctgcgctgcagtcactgcccctggagtcgcggagaaagggccgtaaccggaggacccacgcccctgagcctcgcgctgagcgggggccgcgcagcgcaacgcactggtgaccagactgtccccacgccgggaaccaagcaggagacgacaggcgagagaggagccagacagaccctgaaaagaaggacgggttggggccgggcacattgggggtcaccggccgatggagacaccaaccgacaggccctggctgagggcagctgcgcgggcttatttattaacaggataacccttgaatgtagcagccccgggagggcggcacaggtcgggcgcaggattcagccggagggaagggacggggaagccgagctccagagcaacgaccagggccgaggaggtgcctggagtgcccaccctgggagacagaccccacctccttgggtagtgagcagtgagcagaaagctgtgaacaggctgggctgctggaggtggggcgaggcaggccgactgtactaaagtaacgcaataaacgcattatcagcca

SEQ ID NO: 40 - DNA, 1521 bp, Homo sapiens
  misc_feature (1)..(1): n is a, c, g, or t
  misc_feature (3)..(9): n is a, c, g, or t
  misc_feature (20)..(20): n is a, c, g, or t
  misc_feature (22)..(22): n is a, c, g, or t
  misc_feature (639)..(639): n is a, c, g, or t
  misc_feature (641)..(641): n is a, c, g, or t
  misc_feature (644)..(644): n is a, c, g, or t
  misc_feature (706)..(706): n is a, c, g, or t
  misc_feature (708)..(708): n is a, c, g, or t
  misc_feature (711)..(711): n is a, c, g, or t
  misc_feature (733)..(733): n is a, c, g, or t
  misc_feature (1480)..(1484): n is a, c, g, or t
  misc_feature (1512)..(1513): n is a, c, g, or t
ngnnnnnnnctcactgagancngtcaccccgactcaacgtgagacgcaccgcccggactcaccatgcgtgaatgcatctcagtccacgtggggcaggcaggtgtccagatgggcaatgcctgctgggagctctattgcttggaacatgggattcagcctgatgggcagatgcccagtgacaagaccattggtggaggggacgactccttcaccaccttcttctgtgaaactggtgctggaaaacacgtaccccgggcagtttttgtggatctggagcctacggtcattgatgagatccgaaatggcccataccgacagctcttccacccagagcagctcatcactgggaaagaggatgctgccaacaactatgcccgtggtcactataccattggcaaggagatcattgacccagtgctggatcggatccgcaagctgtctgaccagtgcacaggacttcagggcttcctggtgttccacagctttggtgggggcactggctctggcttcacctcactcctgatggagcggctctctgttgactatggcaagaaatccaagctggaattctccatctacccagccccccaggtgtctacagccgtggtcgagccctacaactctatcctgaccacccanancancctggagcactcagactgtgccttcatggtggacaacgaagcaatctatgacatctgccgcngnaancctagacatcgagcgcccaacntacaccaacctcaatcgcctcattagccaaattgtctcctccatcacagcttctctgcgctttgacggggccctcaatgtggacctgacagagttccagaccaacctggtgccctaccctcgcatccacttccccctggccacctatgcaccagtcatctctgcagaaaaggcataccacgagcagctgtcggtggcagagatcaccaatgcctgctttgagcctgccaaccagatggtaaagtgtgatccccggcacggcaagtacatggcctgctgcctgctgtaccgtggagatgtggtgcccaaggatgtcaacgctgccattgccgccatcaagaccaagcgcagcattcagtttgtggactggtgccccacaggcttcaaggttggtatcaactaccagcctcccactgtggtgcctgggggtgacctggccaaggtgcagcgtgccgtgtgcatgctgagcaacacgaccgccatcgccgaggcctgggcccgcctggaccacaagttcgacctgatgtatgccaagagggcgtttgtgcactggtatgtgggtgagggcatggaggagggtgagttctccgaggcccgtgaggatatggctgccctggagaaggattatgaggaggtgggcatcgactcctatgaggacgaggatgagggagaagaataaagcagctgcctggagcctattcactatgtttattgcaaaatcctttcgaaataaacagtttccttgcannnnnaaaaaaaaaaaaaaaaaaaaaaaaaaanncgtatcga

SEQ ID NO: 41 - DNA, 923 bp, Homo sapiens
aggcatgatggaggtcgagtcctcctactcggacttcatctcctgtgaccggacaggccgtcggaatgcggtccctgacatccagggagactcagaggctgtgagcgtgaggaagctggctggagacatgggcgagctggcactcgagggggcagaaggacaggtggagggaagcgccccagacaaggaagctggcaaccagccccagagcagcgatgggaccacctcgtcttgaatctgaccttgtccaagaaggctggacgagagaccttctgtcccctcccagaggggaaaccctggcactggcccagcagcctcttctctgagctccatgtcccagataaaccaggccagactgagaaggctccccagaggcctctgtggcctccactccgggaaagccctctgcccacacccacaggcttcacattcccaccaccttcgcaccgtgcccaggtacactttcaagacactgtaaccacaagatgttatttattgagctggcgccgggacttgggcggggcctgccctacagtgagcagcccacacaggaacgctcctctcgcgagcggcccgggcagggaccctgtcccaacaccaacacctcctctccagcccaatcttctgggtccagacctgcttgtcccttttttagaaaacacttttaaactttttaaaaattttaaaccttttttcagcagatatggagagagctgacaatcaattcacattttttaagccattttagctaaactgtcattgtgcatctctgaggttccctcatggagctccacagatccatttttagggaagggattttggctcaaaacgatctgaccacctctgccctgtccaccaggataagtgacacctaggacccaggaaataaatgccgatgatttgtgtgaaaaaaaaaaaaaaaa

SEQ ID NO: 42 - DNA, 2362 bp, Homo sapiens
tttgcaggtgcctcaggaaccctgaagctgggctgagccatgatgctgctgccagaacccctgcagagggcctggtttcaggagactcagagtcctctgtgaaaaagcccttggagagcgccccagcagggctgcacttggctcctgtgaggaaggggctcaggggtctgggcccctccgcctgggccgggctgggagccaggcgggcggctgggctgcagcaatggaccgtgagctggcccagcccgcgtccgtgctgagcctgcctgtcgtctgtggccatgcccatcatgggctcctcggtgtacatcacggtggagctggccattgctgtgctggccatcctgggcaatgtgctggtgtgctgggccgtgtggctcaacagcaacctgcagaacgtcaccaactactttgtggtgtcactggcggcggccgacatcgcagtgggtgtgctcgccatcccctttgccatcaccatcagcaccgggttctgcgctgcctgccacggctgcctcttcattgcctgcttcgtcctggtcctcacgcagagctccatcttcagtctcctggccatcgccattgaccgctacattgccatccgcatcccgctccggtacaatggcttggtgaccggcacgagggctaagggcatcattgccatctgctgggtgctgtcgtttgccatcggcctgactcccatgctaggttggaacaactgcggtcagccaaaggagggcaagaaccactcccagggctgcggggagggccaagtggcctgtctctttgaggatgtggtccccatgaactacatggtgtacttcaacttctttgcctgtgtgctggtgcccctgctgctcatgctgggtgtctatttgcggatcttcctggcggcgcgacgacagctgaagcagatggagagccagcctctgccgggggagcgggcacggtccacactgcagaaggaggtccatgctgccaagtcactggccatcattgtggggctctttgccctctgctggctgcccctacacatcatcaactgcttcactttcttctgccccgactgcagccacgcccctctctggctcatgtacctggccatcgtcctctcccacaccaattcggttgtgaatcccttcatctacgcctaccgtatccgcgagttccgccagaccttccgcaagatcattcgcagccacgtcctgaggcagcaagaacctttcaaggcagctggcaccagtgcccgggtcttggcagctcatggcagtgacggagagcaggtcagcctccgtctcaacggccacccgccaggagtgtgggccaacggcagtgctccccaccctgagcggaggcccaatggctatgccctggggctggtgagtggagggagtgcccaagagtcccaggggaacacgggcctcccagacgtggagctccttagccatgagctcaagggagtgtgcccagagccccctggcctagatgaccccctggcccaggatggagcaggagtgtcctgatgattcatggagtttgccccttcctaagggaaggagatctttatctttctggttggcttgaccagtcacgttgggagaagagagagagtgccaggagaccctgagggcagccggttcctactttggactgagagaagggagccccaggctggagcagcatgaggcccagcaagaagggcttgggttctgaggaagcagatgtttcatgctgtgaggccttgcaccaggtgggggccacagcaccagcagcatctttgctgggcaggcccagccctccactgcagaagcatctggaagcaccaccttgtctccacagagcagcttgggcacagcagactggcctggccctgagactggggagtggctccaatagcctcctgccacccacacaccactctccctagactctcctagggttcaggagctgctgggcccagaggtgacatttgacttttttccaggaaaaatgtaagtgtgaggaaaccctttttattttattacctttcactctctggctgctgggtctgccgtcggtcctgctgctaacctggcaccagagcctctgcccggggagcctcaggcagtcctctcctgctgtcacagctgccatccacttctcagtcccagggccatctcttggagtgacaaagctgggatcaaggatagggagttgtaacagagcagtgccagagcatgggcccaggtcccaggggagaggttggggctggcaggccactggcatgtgctgagtagcgcagagctacccagtgagaggccttgtctaactgcctttccttctaaagggaatgtttttttctgagataaaataaaaacgagccaca

SEQ ID NO: 43 - DNA, 3060 bp, Homo sapiens
  misc_feature (13)..(13): n is a, c, g, or t
  misc_feature (383)..(383): n is a, c, g, or t
  misc_feature (504)..(504): n is a, c, g, or t
  misc_feature (559)..(559): n is a, c, g, or t
  misc_feature (708)..(708): n is a, c, g, or t
  misc_feature (711)..(714): n is a, c, g, or t
  misc_feature (717)..(720): n is a, c, g, or t
  misc_feature (723)..(723): n is a, c, g, or t
  misc_feature (725)..(725): n is a, c, g, or t
  misc_feature (727)..(727): n is a, c, g, or t
  misc_feature (729)..(729): n is a, c, g, or t
  misc_feature (735)..(735): n is a, c, g, or t
  misc_feature (753)..(753): n is a, c, g, or t
  misc_feature (1527)..(1527): n is a, c, g, or t
  misc_feature (1550)..(1551): n is a, c, g, or t
  misc_feature (1555)..(1555): n is a, c, g, or t
  misc_feature (1557)..(1557): n is a, c, g, or t
  misc_feature (1563)..(1563): n is a, c, g, or t
  misc_feature (1892)..(1892): n is a, c, g, or t
  misc_feature (1930)..(1930): n is a, c, g, or t
  misc_feature (2343)..(2343): n is a, c, g, or t
  misc_feature (2351)..(2351): n is a, c, g, or t
  misc_feature (2366)..(2366): n is a, c, g, or t
  misc_feature (2475)..(2477): n is a, c, g, or t
  misc_feature (2479)..(2479): n is a, c, g, or t
  misc_feature (2481)..(2481): n is a, c, g, or t
  misc_feature (3042)..(3051): n is a, c, g, or t
  misc_feature (3053)..(3056): n is a, c, g, or t
ttttttttttttnttttgagaattaggacagtttattgtttgaccaacatgctgagtcttttccacattttacacagtttaatgtgaaatcaacatggcggctatgtcttctgagcccataacagatggaattgccaccctctgtgctcctcacagccaatcactttaaagggatgggtgaggggaaagtgaggggagaagtggacacacaccgcgagatgcaggctggccttcaatgctatggaggcttcccacctcctgaaggaaccatctaaacccctgctgcaaggatttcctgatgaaaccacacactgctgggagtgccaaccagacaggggtctggagtccaaggagtttgcacattgagatcccaaggttttggnaacacctaaatagttcatgtcaaacaaaaattcaaagggtgtcctgatctgtgtgggtgcccatgacaatcaatcagagtagacttggggactggcccttgtgcagtagaggagcccaaantaccaccaatattctcactcatatgctgggaagaacctagtgtcctaaccaaaangagtagagatggtctgaggaacacacccacacacagcagtccttgctgtgtaataaatatggagtcacatttgttcacacacagggcagcaatggatgaaaaatggaaacttcactggttctgatcactcctaacttgctgggtgatcntannnngcnnnntgncntncnccatcntggttttcctgcctgtanacaggaaaagttgtgacagctctgcttcacatagctgtaacaaggtgacaatgcctcacattctttggggagaggcagttcggaaacgagtgtgcgcacaatctgctcggttgatgcacacagacatccttctgttcagctgcccctcaagtggctcagacatgcctcactgtcctcggctacctggtcccatctcatcctgacatcctcacctgccttccatcttgtgaaggaatgaggctgctctacctgcaggatgctgaagccaggagggccatccctttattgtcacaactggtatcccagggcagggcctccccgcactggctagccaccaggatgatgcagacgttgcaccccagatgtgtctgcactcttaactaccaccatttcaatccttgtttctgttgccagagatactgaaactggtctggccattgctcccctcagacctgggaacatgactgaatgtttaaggatgacaagaagagagcagcgatagatagcaaggaggcctctgaccaagggaaactgctgccaacagctaccaagccaactagccttggatcacacaactgcagccatggtgctcatgattctgatgtcacaccttcatgttgatgtatgtatgatcacccagcaagttaggagtgatcagaaccaatgtgtttccacttgtaaataggctgtttgctttttccatcttacactcaactttcctgatgcctgcagaacaggagctttgttgataagcttttaagattcacccccttnactcccaccatccccaaaaaagnnggcnangaggancctgctaatctgccaggtcacgtctagtctttggggagagggactgaattgctcaattgagaacatttcctcaaaggaatcctccaatttgccctctgctaacccatctggattcagcaaagatgcaatgctcttgctggggtgctgaggcaatgccatgacatcttcttcaagagcacctaacagtttattatggaaccttaactctgtgccaattctacctgcaagcaaggggacagggatggtgcctgctcaagacaaaaatcagggaaccaacaacttctgaaaaagaggtctggctgcctttccacaccccaggaagggagggncggaaaccgcacgtgccgaagggagcgccatggaaccnctgagatgggaggatgggaggaagccaccctcagcctcagaggccaaggggctggggagaacccaaactcaaagagaggatgttgtgtgcatgctaggaaaggcaggactcactaaggccatgtcaaaccaaatgctatcttttactgctcctctaggccaggatggaaacacagtccacggtgccttggatgtgtgtgcccctgagaagggaactgagtttctactgttttatgggatgtttttttaaaaaagctaatctttagtgccaagaaaataaaaatctaccatacgttcattcactgagacccagtgcagattcctgtaaatggggcggtctcagaggccacaggtgatggcccccgctgccaaccaggcaggacactgtcatgtggactcctgtaaattctctcngaggtaangtaagcactcttccnaacaagcaccacttgggggtgtgcccatggtggggggacactggcccacacaggcatgcacacccgtgcatataaagtacatagagaaatggtggagatattcccgtgnnntntntttgcctgtagtttaacacaactatgcattattttattgatggcaagacaatcacaagttatttgacaatattaagtatttcttatttcaacacgttgcagtacttttgaatttccaaaacttatcacaatgcaagttccaacttgagagcaggagaaacaagaatatacattgagcacatgtatctccgtgaggatgtgtttgtggaaggtgtatacacaagtctatctctatatataattatgtacacacatataaaaactaaacacatgacatctgaaacacgttcaaacattggtccttgccttctgcaagaggtgctcagtgggatcctgcttcctctcttcttcacctgaagataaattccttgctagagatgagctctggcatacagcctcctaggcagagggtgtgtggcaggcccactgcacaaatatcagtcctgccagattctgctgcacttactgcctgccatttcagattaatttctgagaagtttcaaaattcattccaacgaccttgtggagttcagcccaccataccccagatggtcattcatcnnnnnnnnnncnnnnccag

SEQ ID NO: 44 - DNA, 4192 bp, Homo sapiens
gtggcgatcatggcaagttagaagttttctgactcctttcggaggagcctccgggaccccggggagtaacaggtgtctggaggctgaagggtggaggggttcctggatttgggttttgcttgtgaaactcccctccaccctcctctctcgcacccacccaccccctcacccccttctttttccgtccttggaaaatggtgtccaagctcacgtcgctccagcaagaactcctgagcgccctgctgagctccggggtcaccaaggaggtgctggttcaggccttggaggagttgctgccatccccgaacttcggggtgaagctggagacgctgcccctgtcccctggcagcggggccgagcccgacaccaagccggtcttccatactctcaccaacggccacgccaagggccgcttgtccggcgacgagggctccgaggacggcgacgactatgacacacctcccatcctcaaggagctgcaggcgctcaacaccgaggaggcggcggagcagcgggcggaggtggaccggatgctcagtgaggacccttggagggctgctaaaatgatcaagggttacatgcagcaacacaacatcccccagagggaggtggtcgatgtcaccggcctgaaccagtcgcacctctcccagcatctcaacaagggcacccctatgaagacccagaagcgtgccgctctgtacacctggtacgtcagaaagcaacgagagatcctccgacaattcaaccagacagtccagagttctggaaatatgacagacaaaagcagtcaggatcagctgctgtttctctttccagagttcagtcaacagagccatgggcctgggcagtccgatgatgcctgctctgagcccaccaacaagaagatgcgccgcaaccggttcaaatgggggcccgcgtcccagcaaatcttgtaccaggcctacgatcggcaaaagaaccccagcaaggaagagagagaggccttagtggaggaatgcaacagggcagaatgtttgcagcgaggggtgtccccctccaaagcccacggcctgggctccaacttggtcactgaggtccgtgtctacaactggtttgcaaaccgcaggaaggaggaggcattccggcaaaagctggccatggacgcctatagctccaaccagactcacagcctgaaccctctgctctcccacggctccccccaccaccagcccagctcctctcctccaaacaagctgtcaggtaagcaaaggttgggcctcactgcctcggcaacccaaccatcctggttcttgccacggatcttatctggtttaagggttttcagaggagcaaacgcttttgagatgatcctagggccgctctctcattgccagaatatactcccctggaaataatgtgtggctctgatcagtttcctccaactcctggttcagccattgccctgtgagggctcactcggcttccagggagccctttaccctatttgtctccttccctcttcttctccctgtgtggctgctgactcagcggtcattctacctgaggaggctgccttatgggtgggccagatccaaaccgcagcaaacgggtcgtgatggcgtggcaaccctcactgtgttggaggatggcactccggccacctcctccatctctggccatatcctgcccctcgctcggtccggctgcctcaggagaagctcagtagcctttggggacggccactctgttggtggcctctgcttgttggcttccgtgtgtcatcagggttggtgggggtcagtcacttgaaatctttgcagcaatgagttgggaaaaactgaccgagtacctgctccatcatgcttgattgagtgctcctgtgtgctggccctggcctggattagaatgcctctgctgtgggctttgggtttgtcaggatggaatcctacgacctcctcgggggaaagcacacctcatgctgagcgctctcttaggcacaggctgggatggagcacttcttctggtccttcattcttctggcaaagctggcttctagaatggatgtgctcactggggtctgtgtggtgcccatgaccacaaagtgtagcagcctcctgcctgctccaagaaaagggcttgtgaaaggaaagccaaacactgtttctaactcaggggtgattctgaaacctgttggctcccctcacctgtcggttgccttctgatgagaaaggcctgagggctgggggctgacccaagtgttgaggggaccaaagccaccaagacaggctcggagccatcagctgggtggtgtacaagcatttgttccatccctgctgtgccctcccatagcactgcctctttccaggggcctctgggagcctgacagtgcccagcatgaaggtggggccagtgctgggggtttctgtaggtccactcccacagaggagagaggctcagccacacaggaagaaagtcttggttacttaagaggcagagaagccctaggcaaagactggcctgattgcagagtaacttcgcccctttaggaaattcaaagcagggttctgaggcaaatggcacatggctggcactgagcagtaccagtgtgcttgcccaccacagcgatccacggagctgaagctgggagctacagggggcgtggttggggcaaggggcattactgggaagacaatggccattgtgttgggacctgtgatctccacaccaaagtcagggagcctggaagccaaacaaaggcccagcagccttctgacaagcaagggctgtgctgaggtcaccacggggtcgttggtttaggcatcctgtgtgctgacaggagacccagagagctagggctggagggacagggagcagggcagaaaacacagcctgtgtactcctctgactggagtctaggaagggcgtgtcatgggaagcggatactcgggtgctcaagtctgatctttctaaaatcttgtaatgttagaatttggaggaatttgaagaaggaactgaggcccagaaagaggcagtgatttgccaaagtgacacagagcaatggtacgaaaacaaggactagagctctggcctgctggttcccactccatactttcccacagcactacgatgtgttgaatgcttaccaagtcctgggatatgctagtgatgtacgagctgcgcgtcctgcctctgggaggttactgtctggtaggaaggatatcgggtcactgtcgagtccccagaaccagctgcagatggaggttttgtttgggggctttgtggatctttctgcggtgtaataagatcctatactgtttctggagcaacagttatgggacactgatattatcagtggctgcctttcttctgtcttttttttttttttttttttttgagagacaggtctacctctgtcacccgagctggagtgcagtggtgcagtcttggctcactacagcctcgaactcctggtctcttgcggtcctcctgtcttagcctccctttgtgcttgggattacagttgtgagattgtgcccgcccttctgctttaattttcactctgggctcctcaacatggtccttgtcccaagcccagggactggcttctctttctctgagtgtagttatgtatctgggttctaaccagtaaggttataactgtggctaattcacataacttctctgagtctgaatttcctgcctacaaaatggagaaataggaccttccacacagggtgcatgtgaggatgaaaggagtgaatgtataaagacacctttcccgataacccatactaccctcattatgactcttaacattagagagggctaaacaagggcagtgagaagactggcaggcagcagaaatcattttctttttgatctcacacaccagggcattccccgtaagaggcagtgagatgtagcctggccctggaactagaaacagaggtggctgctgtgctgtgcctagatgcacgatgctggggtcaaagacttgtgtccccgcctcaggctgccaggatggcggtgtgccgtgacagggctcccgagtcatcgactcaggcagacagcaggctggagcccagcattcaggggtggcttctgtctgtagagccgcatggcactcttcccacctcagtgcccacagccaaggtagggtcactaaccaagccagaaacgtaactgtgtgcagaataccgaaaaaaaaaaaaaa

SEQ ID NO: 45 - DNA, 1426 bp, Homo sapiens
ctttgtgaagaaggaattggcaacactgaaacctccagaacaaaggctgtcactaaggtcccgctgccttgatggattatacacttgacctcagtgtgacaacagtgaccgactactactaccctgatatcttctcaagcccctgtgatgcggaacttattcagacaaatggcaagttgctccttgctgtcttttattgcctcctgtttgtattcagtcttctgggaaacagcctggtcatcctggtccttgtggtctgcaagaagctgaggagcatcacagatgtatacctcttgaacctggccctgtctgacctgctttttgtcttctccttcccctttcagacctactatctgctggaccagtgggtgtttgggactgtaatgtgcaaagtggtgtctggcttttattacattggcttctacagcagcatgtttttcatcaccctcatgagtgtggacaggtacctggctgttgtccatgccgtgtatgccctaaaggtgaggacgatcaggatgggcacaacgctgtgcctggcagtatggctaaccgccattatggctaccatcccattgctagtgttttaccaagtggcctctgaagatggtgttctacagtgttattcattttacaatcaacagactttgaagtggaagatcttcaccaacttcaaaatgaacattttaggcttgttgatcccattcaccatctttatgttctgctacattaaaatcctgcaccagctgaagaggtgtcaaaaccacaacaagaccaaggccatcaggttggtgctcattgtggtcattgcatctttacttttctgggtcccattcaacgtggttcttttcctcacttccttgcacagtatgcacatcttggatggatgtagcataagccaacagctgacttatgccacccatgtcacagaaatcatttcctttactcactgctgtgtgaaccctgttatctatgcttttgttggggagaagttcaagaaacacctctcagaaatatttcagaaaagttgcagccaaatcttcaactacctaggaagacaaatgcctagggagagctgtgaaaagtcatcatcctgccagcagcactcctcccgttcctccagcgtagactacattttgtgaggatcaatgaagactaaatataaaaaacattttcttgaatggcatgctagtagcagtgagcaaaggtgtgggtgtgaaaggtttccaaaaaaagttcagcatgaaggatgccgtgtgtgttgttgccaacacttggaacacaatgactggagacatagttgtgcatgcctggcacaacatcaagcctgtgattgtgtttattgatgatgttgaacaagtggtggctttgagggattctgtatgccaagtggaaaaaaaagatgtctccggaattcgacaggttatca

SEQ ID NO: 46 - DNA, 606 bp, Homo sapiens
gtgcgcccagccagccatggggaagatcaccctctacgaggaccggggcttccagggccgccactacgaatgcagcagcgaccaccccaacctgcagccctacttgagccgctgcaactcggcgcgcgtggacagcggctgctggatgctctatgagcagcccaactactcgggcctccagtacttcctgcgccgcggcgactatgccgaccaccagcagtggatgggcctcagcgactcggtccgctcctgccgcctcatcccccactctggctctcacaggatcagactctatgagagggaggactacagaggccagatgatagagttcactgaggactgctcctgtcttcaggaccgcttccgcttcaatgaaatccactccctcaacgtgctggagggctcctgggtcctctacgagctgtccaactaccgaggacggcagtacctgctgatgccaggggactataggcgctaccaggactggggggccacgaatgccagagtgggctctctgaggagagtcatagatttctcctgaaatatgtcctcctttgttgtttcttaatttggaaactaataaaatattttctgtgtgttcctggc

SEQ ID NO: 47 - DNA, 588 bp, Homo sapiens
atgtggttcctggttctgtgcctcgccctgtccctgggggggactggtgctgcgcccccgattcagtcccggattgtgggaggctgggagtgtgagcagcattcccagccctggcaggcggctctgtaccatttcagcactttccagtgtgggggcatcctggtgcaccgccagtgggtgctcacagctgctcattgcatcagcgatgtgaaggtcgtggagttgcccacccaggaacccgaagtggggagcacctgtttggcttccggctggggcagcatcgaaccagagaatttctcatttccagatgatctccagtgtgtggacctcaaaatcctgcctaatgatgagtgcaaaaaagcccacgtccagaaggtgacagacttcatgctgtgtgtcggacacctggaaggtggcaaagacacctgtgtgggtgattcagggggcccgctgatgtgtgatggtgtgctccaaggtgtcacatcatggggctacgtcccttgtggcacccccaataagccttctgtcgccgtcagagtgctgtcttatgtgaagtggatcgaggacaccatagcggagaactcctga

SEQ ID NO: 48 - DNA, 3426 bp, Homo sapiens
ttcaggaaccgggttggcgaatcgagttgccaggtgtcactgatgctacagaacagctctgccagcagccttccacgggggagggagcctgccagctgcgaggacctctgtggtggaggagttggtgctgatggtggtggtagtgaccgctatgggtccctgaggcctggctggccagcaagagggcagggttggctagaggaggaagacggcgaggacgtgcgaggggtgctgaagaggcgcgtggagacgaggcagccaactgaggaggcgatccccgagcaggaggtggagcagctggacttccgagacctcctggggaagaaggtgagtacaaagaccctatcggaagacgacctgaaggagatcccagccgagcagatggatttccgcgccaacctgcagcggcaaatgaagccaaagactgtgtctgaggaagagaggaaggtgcacagcccccagcaggtcgattttcgctctgtcctggccaagaaggggacttccaagacccccgtgcctgagaaggtgccaccgccaaaacctgccaccccggattttcgctcagtgctgggtggcaagaagaaattaccagcagagaatggcagcagcagtgccgagaccctgaatgccaaggcagtggagagttccaagcccctgagcaatgcacagccttcaggcgccttgaaacccgtgggcaacgccaagcctgctgagaccctgaagccaatgggcaacgcaaagcctgccgagacccttgaagcccatggcaatgccaagcctgatgagaacctgaaatccgctagcaaagaagaactcaagaaagacgttaagaatgatgtgaactgcaagagaggccatgcagggaccacagataatgaaaagagatcagagagccaggggacagccccagccttcaagcagaagctgcaagatgttcatgtggcagagggcaagaagctgctgctccagtgccaggtgtcttctgaccccccagccaccatcatctggacgctgaatggaaagaccctcaagaccaccaagttcatcatcctctcccaggaaggctcactctgctccgtctccatcgagaaggcactgcctgaggacagaggcttatacaagtgtgtagccaagaatgacgctggccaggcggagtgctcctgccaagtcaccgtggatgatgctccagccagtgagaacaccaaggccccagagatgaaatcccggaggcccaagagctctcctcctcccgtgctaggaactgagagtgatgcgactgtgaaaaagaaacctgcccccaagacacctccgaaagcagcaatgccccctcagatcatccagttccctgaggaccagaaggtacgcgcaggagagtcagtggagctgtttggcaaagtgacaggcactcagcccatcacctgtacctggatgaagttccgaaagcagatccaggaaagcgagcacatgaaggtggagaacagcgagaatggcagcaagctcaccatccttgccgggcgccaggagcactgcggctgctacacactgctggtggagaacaagtcgggcagcaggcaggcccaggtcaacctatctgtcgtggataagccagaccccccagctggcacaccttgtgcctctgacattcggagctcctcactgaccctgtcctggtatggctcctcatatgatgggggcagtgctgtacagtcctacagcatcgagatctgggactcagccaacaagacgtggaaggaactagccacatgccgcagcacctctttcaacgttcaggacctgctgcctgaccacgaatataagttccgtgtacgtgcaatcaacgtgtatggaaccagtgagccaagccaggagtctgaactcacaacggtaggagagaaacctgaagagccgaaggatgaagtggaggtgtcagacgatgatgagaaggagcccgaggttgattaccggacagtgacaatcaatactgaacaaaaagtatctgacttctacgacattgaggagagattaggatctgggaaatttggacagtgctttcgacttgtagaaaagaaaactcgaaaagtctgggcagggaagttcttcaaggcatattcagcaaaagagaaagagaatatccggcaggagattagcatcatgaactgcctccaccaccctaagctggtccagtgtgtggatgcctttgaagaaaaggccaacatcgtcatggtcctggagatcgtgtcaggaggggagctgtttgagcgcatcattgacgaggactttgagctgacggagcgtgagtgcaccaagtacatgcggcagatctcggagggagtggagtacatccacaagcagggcatcgtgcacctggacctcaagccggagaacatcatgtgtgtcaacaagacgggcaccaggatcaagctcatcgactttggtctgccgaggaggctggagaacgcggggtctctgaaggtcctctttggcaccccagaatttgtggctcctgaagtgatcaactatgagcccatccggtacgccacagacatgtggagcatcagggtcatctgctacatcctagtcagtggccccttccccttcatgggagacaacgataacgaaaccttggccaacgttacctcagccacctgggacttcgacgacgaggcattcgatgagatctccgacgatgccaaggatttcatcagcaatctgctgaagaaagatatgaaaaaccgcctggacctggcgcagtgccttcagcatccatggctaatgaaagataccaagaacatggaggccaagaaactctccaaggaccggatgaagaagtacatggcaagaaggaaatggcagaaaacgggcaatgctgtgagagccattggaagactgtcctctatggcaatgatctcagggctcagtggcaggaaatcctcaacagggtcaccaaccagcccgctcaatgcagaaaaactagaatctgaagatgtgtcccaagctttccttgaggctgttgctgaggaaaagcctcatgtaaaaccctatttctctaagaccattcgcgatttagaagttgtggagggaagtgctgctagatttgactgcaagattgaaggatacccagaccccgaggttgtctggttcaaagatgaccagtcaatcagggagtcccgccacttccagatagactacgatgaggacgggaactgctctttaattattagtgatgtttgcggggatgacgatgccaagtacacctgcaaggctgtcaacagtcttggagaagccacctgcacagcagagctcattgtggaaacgatggaggaaggtgaaggggaaggggaagaggaagaagagtgaaacaaagccagagaaaagcagtttctaagtcatattaaaaggactatttctctaaaactcaaaaaaaaa

SEQ ID NO: 49 - DNA, 2402 bp, Homo sapiens
agctcacagcaagtccaggctagaggtagaaacgtgagagccccacggctggggaagattgccatgggattggagatgagctccaaggacagccctggcagtctggatggaagagcttgggaagatgctcagaaaccacaaagtgcctggtgcggtgggaggaaaaccagagtgtatgctacaagcagccggcgggcgccgccgagtgaggggacgcggcgcggtggggcggcgcggcccgaggaggcggcggaggaggggccgcccgcggcccccggctcactccggcactccgggccgctcggcccccatgcctgcccgaccgcgctgccggagccccaggtgaccagcgccatgtccagccaggtggtgggcattgagcctctctacatcaaggcagagccggccagccctgacagtccaaagggttcctcggagacagagaccgagcctcctgtggccctggcccctggtccagctcccactcgctgcctcccaggccacaaggaagaggaggatggggagggggctgggcctggcgagcagggcggtgggaagctggtgctcagctccctgcccaagcgcctctgcctggtctgtggggacgtggcctccggctaccactatggtgtggcatcctgtgaggcctgcaaagccttcttcaagaggaccatccaggggagcatcgagtacagctgtccggcctccaacgagtgtgagatcaccaagcggagacgcaaggcctgccaggcctgccgcttcaccaagtgcctgcgggtgggcatgctcaaggagggagtgcgcctggaccgcgtccggggtgggcggcagaagtacaagcggcggccggaggtggacccactgcccttcccgggccccttccctgctgggcccctggcagtcgctggaggcccccggaagacagcagccccagtgaatgcactggtgtctcatctgctggtggttgagcctgagaagctctatgccatgcctgaccccgcaggccctgatgggcacctcccagccgtggctaccctctgtgacctctttgaccgagagattgtggtcaccatcagctgggccaagagcatcccaggcttctcatcgctgtcgctgtctgaccagatgtcagtactgcagagcgtgtggatggaggtgctggtgctgggtgtggcccagcgctcactgccactgcaggatgagctggccttcgctgaggacttagtcctggatgaagagggggcacgggcagctggcctgggggaactgggggctgccctgctgcaactagtgcggcggctgcaggccctgcggctggagcgagaggagtatgttctactaaaggccttggcccttgccaattcagactctgtgcacatcgaagatgagccgaggctgtggagcagctgcgagaagctcctgcacgaggccctgctggagtatgaagccggccgggctggccccggagggggtgctgagcggcggcgggcgggcaggctgctgctcacgctaccgctcctccgccagacagcgggcaaagtgctggcccatttctatggggtgaagctggagggcaaggtgcccatgcacaagctgttcttggagatgctcgaggccatgatggactgaggcaaggggtgggactggtgggggttctggcaggacctgcctagcatggggtcagccccaagggctggggcggagctggggtctgggcagtgcacagcctgctggcagggccagggctaatgccatcagcccctgggaacaggccccacgccctctcctccccctcctagggggtgtcagaagctgggaacgtgtgtccaggctctgggcacagtgctgccccttgcaagccataacggtgcccccagagtgtagggggccttgcggaagccatagggggctgcacgggatgcgtgggaggcagaaacctatctcagggagggaaggggatggaggccagagtctcccagtgggtgatgcttttgctgctgcttaatcctaccccctcttcaaagcagagtgggacttggagagcaaaggcccatgcccccttcgctcctcctctcatcatttgcattgggcattagtgtccccccttgaagcaataactccaagcagactccagcccctggacccctggggtggccagggcttccccatcagctcccaacgagcctcctcagggggtaggagagcactgcctctatgccctgcagagcaataacactatatttatttttgggtttggccagggaggcgcagggacatggggcaagccagggcccagagcccttggctgtacagagactctattttaatgtatatttgctgcaaagagaaaccgcttttggttttaaacctttaatgagaaaaaaatatataataccgagctc

SEQ ID NO: 50 - DNA, 2428 bp, Homo sapiens
  misc_feature (29)..(31): n is a, c, g, or t
  misc_feature (207)..(207): n is a, c, g, or t
  misc_feature (268)..(268): n is a, c, g, or t
  misc_feature (283)..(283): n is a, c, g, or t
  misc_feature (443)..(443): n is a, c, g, or t
ttttttttttttttttttttttttttttnnntacacaaaatcagaacaatttattacctatagctaagaatgagagaacttgggtagggtcccacagagggttgcatctgaaacagagtaacagcaacctgaggctgcaggggacaacttaggtaaggcaagcggattgcattagctacgttttccatgttccccatggattggctnaatttgagtaatttgggctggaatacagcagtctggagtgtgaaagcccactagccttgtncctcaacactgagtnctcacacacacacacctaaaatgtgtggtactgacataaagacagacatatgaccaataaaatagagaatccacatataaaccatggcatatatggacaaatgattttgacaagtgtgccaagactactcaacagaggaaagatgctcttttcaaaaaantggtgcttggaaaactggatagccacataaagtggacttttgccttaaaccatatgcaaaaatgaaccccaagtagattaaagatctaaatgtagccaggcacagtgcattacaactcctgcctgtggtttctgatgtggttttgtggcattggggaatgcttgtgtgttctagaagcctcctcccctcattttaaccacgtgtttatttctctgcatcctcatagacacgtaggctgccccagggcagggactgtgtctgtcttgttcactatctccatgaccgagtacagaacctggaattaataagtgctcaagtaaataattgctgtgaatgtagtcaatctttaataggtagtttgttacaatccactcccttccatctctcatttgtagtttgcattttacctctaattacaatcattttttaatattatgcatttttatttttttattgtggaaattatgaacatgaataaatataaacagaaaagcataatgattctccttatacttctcacctagaatcaataattatcaatcaaaaccaatatggtttcatctatatgcccacctacttctcctcttgtaataattccaaggaaatcccagatccatatgattaatccttaaatacttcaatgtgttttcctaaaacacattaactattctaaagacagccatagtacattatcacacatgaaatattaacaataattatttcatgtcttcatatattcaatcgatattcatgtttctaattgtataaatgttataaattattctttacagtttgtttaaattctaatccacttaagttctgcactttgtgattagtgtcttaattgtattttaatatgtttgcttttagatgagaagaaattttaagaattaataggtcaaatctgttcatctttttcttaattacagtccctttttatttaaggcacaatgcttcagtaagcaacatctcatagtttctgtgggaaaagtatgtgataacacaattttaaatccaacttaagatgacctaactcagaacctacctctactccagctgcagccaggagccaccgggtggactccattctgccccgtgcattgaagtagtggagcttgggcttctctgccatgatagcagtctcctggaggtttctctaagcctgaatgaatgaatgaatgaatgaataattgaaacgatagaatcaaaaatgtactttaggatatgtagttgaaaaccaccaacaatactgaagaagaaccttccttcttcatgactgtgttggaggagttcctggaatgttttcttggctcaaattgttacccagcagtggccaccctcagattccagcaaaccagtctcaagtcttcattggctaactgtgacttttcttggcagcataagaggtgagagtatgtggtaaaaatacatgtataggagttattggaagaggaagaattcaagaactaatatttattgaaaacttcctagtgatccttcctcaatgctagtccctttcaatattttatatctttaaccctccttatagtcccgtgaaatgattgttatctccatttttttagttaatgaaatggaacatcagagaaatacaatgttcacagtcacactccggttggtgatggacatgaatatctacagcaaggactaaaatgaagtcactcctggaagccagctgggtgaaggccctgggaacccatgaactggccatgaaaccagaggatgtcactgacagggaggaccggcagggagctaagtcactcttcacctctttgactgtgagactacatttgatcaaaaccagaaattaggcctcagacttgtttaactgtagctagaagatccaaaatctatcaacagacagagattgttaatccctgcagcttttgtaattctgtattctaactctatggggtgcattttgttttataagctggaagaagagatgttgctgcattaattttgcc

SEQ ID NO: 51 - DNA, 2231 bp, Homo sapiens
cgagctgcgcctctcggcaagatttcgcgctgcccatcccgggccctttcatcagtaatcagtagtggatcactctgccaagcggcaggaagaattaaggaaacgacaaggagacgctcggctctctcccgcttggctcctttcggcctcctcttcccttcgctccggcccggtgaaactgaacttataatcgtcactggattgtaagtacccgaggcgaagagagctcgctgagccctgattttttgagtgtctttgttccgggagagtttgtgagttgaaagtatctctgctgggctttctgggccgaaaaccgttccgggggagccgccatttgctttcctgttccctagctagctagctagctctctccgcgttgtccggcagcggcacctagaggttgggacttggcattgcatctgatttaatgaacttaagtctgtgaataagcctttgtgttaacgactggtattcggtcacagcatatttagagaaaagacttggagcttaaataaaaactaaggcaaaatagacgcttagctgctgatctacagagaacttcttgtaattaaaagatttcaattcatagcaaactggtgttttaaactattgcagtagctggaactttttagtgtaaccagcatttattggagaagtgaatcacaaggaaataaagatgagtaaaagcaaagatgatgctcctcacgaactggagagccagtttatcttacgtctgcctccagaatatgcctctactgtgagaagggcagtacagtctggtcatgtcaacctcaaggacagactgacaattgagttacatcctgatgggcgtcatggaatcgtcagagtggaccgtgttccattggcctcaaaattagtagacctgccctgtgttatggaaagcttgaaaaccattgataaaaaaactttttacaagacagctgatatctgtcagatgcttgtatccacagttgatggtgatctctatcctcctgtggaggagccagttgctagcactgatcctaaagcaagcaagaaaaaggataaggacaaagagaaaaagtttatctggaaccacggaattactctgcctctaaagaatgtcaggaagagaaggttccggaagacagcaaagaagaaatatattgaatctccagatgttgaaaaagaagtgaaacgattgctgagtacagatgctgaagctgttaggactcggtgggaaataattgccgaagatgaaacaaaggaggcagaaaatcaaggcctggatatctcttctccaggaatgtctggtcacaggcagggccatgactcattagaacatgatgagcttcgggagatattcaatgacctcagcagcagcagtgaggatgaagatgagacccagcatcaagatgaagaagatataaacatcattgacacggaggaagatctggagagacagctacaggacaagctaaatgaatcagatgaacagcaccaggaaaatgaaggaaccaatcagctggttatgggaattcagaatcagattgacaacatgaaaggcaagctccaagagacccaggacagggcaaaacgacaagaggatctcatcatgaaagtggaaaatctggctctcaagaacagatttcaggctgtactggatgagctcaaacaaaaggaagaccgagaaaaggagcaactcagctctttgcaagaggagctagaatcactcctagagaagtaaaaagaactgatatttaatttcagtcttcagactggtcagcattagaaaattcttggctttattgtactgggtattaagaccttgctcttcctagtccttttaatgctgtgtgttctgttaagttctttcatttgtttgtaattttgtttttcagcaaatttatattgttttgctaggtgttcatcctataagaagcaggatcgtataggcagaaaaatgattgtaggaaagttgcaggattagcggaatgtatggttcaaccttaattatagcttcattgcaggactttactgtttctccattttctagaagctgctgttgctgctttgtgatgacgtgagatcaataagaagaacctagtctagagacaatgatgctagtttgcatatgttttcctatgcaatagttgttttcccagttattcaaagcagctttctatatgtagagatgcaaattattaagttgtttccaatacaataaataaaagcatctgtttttcacttta

SEQ ID NO: 52 - DNA, 1164 bp, Homo sapiens; identical to SEQ ID NO: 26
  misc_feature (31)..(35): n is a, c, g, or t
  misc_feature (37)..(37): n is a, c, g, or t
  misc_feature (39)..(47): n is a, c, g, or t
  misc_feature (49)..(49): n is a, c, g, or t
  misc_feature (51)..(52): n is a, c, g, or t
  misc_feature (54)..(54): n is a, c, g, or t
  misc_feature (56)..(62): n is a, c, g, or t
  misc_feature (64)..(69): n is a, c, g, or t
  misc_feature (71)..(71): n is a, c, g, or t
  misc_feature (73)..(77): n is a, c, g, or t
  misc_feature (79)..(79): n is a, c, g, or t
  misc_feature (81)..(82): n is a, c, g, or t
  misc_feature (124)..(124): n is a, c, g, or t
  misc_feature (126)..(126): n is a, c, g, or t
  misc_feature (128)..(128): n is a, c, g, or t
  misc_feature (132)..(132): n is a, c, g, or t
  misc_feature (823)..(823): n is a, c, g, or t
  misc_feature (826)..(826): n is a, c, g, or t
  misc_feature (927)..(930): n is a, c, g, or t
  misc_feature (967)..(968): n is a, c, g, or t
  misc_feature (984)..(984): n is a, c, g, or t
  misc_feature (1160)..(1160): n is a, c, g, or t

SEQ ID NO: 53 - DNA, 664 bp, Homo sapiens
ggattgttggtctgcgtggaacttctcaggtggacaccagagcatggaacacatccacgacagcgatggcagttccagcagcagccaccagagcctcaagagcacagccaaatgggcggcatccctggagaatctgctggaagacccagaaggcgtgaaaagatttagggaatttttaaaaaaggaattcagtgaagaaaatgttttgttttggctagcatgtgaagattttaagaaaatgcaagataagacgcagatgcaggaaaaggcaaaggagatctacatgacctttctgtccagcaaggcctcatcacaggtcaacgtggaggggcagtctcggctcaacgagaagatcctggaagaaccgcaccctctgatgttccagaaactccaggaccagatctttaatctcatgaagtacgacagctacagccgctttcttaagtctgacttgtttttaaaacacaagcgaaccgaggaagaggaagaagatttgcctgatgctcaaactgcagctaaaagagcttccagaatttataacacatgagcccccaaaaagccgggactggcagctttaagaagcaaaggaatttcctctcaggacgtgccgggtttatcattgctttgttatttgtaaggactgaaatgtacaaaacccttcaat

SEQ ID NO: 54 - DNA, 1253 bp, Homo sapiens
ggcacgaggcgcgagcgcggccgctcccgatgcgctcgtgccgcccccgccgtgctcctcggcagccgttgctcggccggttttggtaggcccgggccgccgccaggcctccgcctgagcccgcacccgccatggacaactacgcagatctttcggataccgagctgaccaccttgctgcgccggtacaacatcccgcacgggcctgtagtaggatcaactcgtaggctttacgagaagaagatcttcgagtacgagacccagaggcggcggctctcgccccccagctcgtccgccgcctcctcttatagcttctctgacttgaattcgactagaggggatgcagatatgtatgatcttcccaagaaagaggacgctttactctaccagagcaagggctacaatgacgactactatgaagagagctacttcaccaccaggacttatggggagcccgagtctgccggcccgtccagggctgtccgccagtcagtgacttcattcccagatgctgacgctttccatcaccaggtgcatgatgacgatcttttgtcttcttctgaagaggagtgcaaggatagggaacgccccatgtacggccgggacagtgcctaccagagcatcacgcactaccgccctgtttcagcctccaggagctccctggacctgtcctattatcctacttcctcctccacctcttttatgtcctcctcatcatcttcctcttcatggctcacccgccgtgccatccggcctgaaaaccgtgctcctggggctgggctgggccaggatcgccaggtcccgctctggggccagctgctgcttttcctggtctttgtgatcgtcctcttcttcatttaccacttcatgcaggctgaagaaggcaaccccttctagagggagccatgagggtctgggcttcagagctaggtctttggggaagtcctggctgactgccttagcagtgggggtgggggtgggggcaggggcaggggctttatgtgtttttgcttggggggcgctgggcctagcccagagtagtgcttgctccccctgccttgtcccaccagggaggcagcagactcaggccctccatggtcctctttgtcattttgttgacatgcattcctccttttgtcatcttgttggggggaggggattaaccaaaggccaccctgactttgtttttgtggacacacaataaaagccccgtttatttgtaaaaaaaaaaaaaaaaaaaaaaaaaaaaaaaaa

SEQ ID NO: 55 - DNA, 1590 bp, Homo sapiens
  misc_feature (1197)..(1206): n is a, c, g, or t
  misc_feature (1209)..(1209): n is a, c, g, or t
  misc_feature (1251)..(1251): n is a, c, g, or t
  misc_feature (1276)..(1276): n is a, c, g, or t
  misc_feature (1305)..(1305): n is a, c, g, or t
gccaactcccctccgctccagtcacttgtctggagcttgaagaagtgggtattccccttcccaccccaggcactggaggaggcggccccccggggattccaggacctgagctccgggagctggactcgcagcgacgcggcagagcgacgggcgccgggaagcgaggagacgcccgcgggaggcccagctgctcggagcaactggcatggcccgagccatggccgccgcgtggccgctgctgctggtggcgctactggtgctgtcctggccacccccaggaaccggggacgtcgtcgtgcaggcgcccacccaggtgcccggcttcttgggcgactccgtgacgctgccctgctacctacaggtgcccaacatggaggtgacgcatgtgtcacagctgacttggacgcggcatggtgaatctggcagcatggccgtcttccaccaaacgcagggccccagctattcggagtccaaacggctggaattcgtggcagccagactgggcgcggagctgcggaatgcctcgctgaggatgttcgggttgcgcgtagaggatgaaggcaactacacctgcctgttcgtcacgttcccgcagggcagcaggagcgtggatatctggctccgagtgcttgccaagccccagaacacagctgaggttcagaaggtccagctcactggagagccagtgcccatggcccgctgcgtctccacagggggtcgcccgccagcccaaatcacctggcactcagacctgggcgggatgcccaatacgagccaggtgccagggttcctgtctggcacagtcactgtcaccagcctctggatattggtgccctcaagccaggtggacggcaagaatgtgacctgcaaggtggagcacgagagctttgagaagcctcagctgctgactgtgaacctcaccgtgtactaccccccagaggtatccatctctggctatgataacaactggtaccttggccagaatgaggccaccctgacctgcgatgctcgcagcaacccagagcccacaggctataattggagcacgaccatgggtcccctgccaccctttgctgtggcccagggcgcccagctcctgatccgtcctgtggacaaaccaatcaacacaactttaatctgcaacgtcaccaatgccctaggagctcgccaggcagaactgaccgtccaggtcaaagnnnnnnnnnngtncagagcatgccagcgcctcagctaatgggcatgtctcctatncagctgtgagcagagagaacagctnttcccaggatccacagacagagggcacanggtgacagcgtcggcactgagaggggagagagactgtagctggcaaggacgtgggccttcagagttggacccgaccccaatggatgaagacccacttcaaagagaccagcctctgtgcctgtgccagacctcttggctagaaggactcactggactcaggaaagctgctaggctcacagttacagattattacagtacatggacagagattaagatcagcatagggaggaggtgcactagacacgttccactacagatgaggcgacggcttgcatctgccctctt

SEQ ID NO: 56 - DNA, 1044 bp, Homo sapiens
gaccggggcgtgcggagggatgtggcccggaatattggtagggggggcccgggtggcgtcatgcaggtaccccgcgctggggcctcgcctcgccgctcactttccagcgcagcggccgccgcagcggacactccagaacggcctggccctgcagcggtgcctgcacgcgacggcgacccgggctctcccgctcattcccatcgtggtggagcagacgggtcgcggcgagcgcgcctatgacatctactcgcggctgctgcgggagcgcatcgtgtgcgtcatgggcccgatcgatgacagcgttgccagccttgttatcgcacagctcctcttcctgcaatccgagagcaacaagaagcccatccacatgtacatcaacagccctggtggtgtggtgaccgcgggcctggccatctacgacacgatgcagtacatcctcaacccgatctgcacctggtgcgtgggccaggccgccagcatgggctccctgcttctcgccgccggcaccccaggcatgcgccactcgctccccaactcccgtatcatgatccaccagccctcaggaggcgcccggggccaagccacagacattgccatccaggcagaggagatcatgaagctcaagaagcagctctataacatctacgccaagcacaccaaacagagcctgcaggtgatcgagtccgccatggagagggaccgctacatgagccccatggaggcccaggagtttggcatcttagacaaggttctggtccaccctccccaggacggtgaggatgagcccacgctggtgcagaaggagcctgtagaagcagcgccggcagcagaacctgtcccagctagcacctgagagctgggcctcctctccagaatcatgtggaggggccagaggcttgccagacccccagctgggccctgctcaccccttgttgctgggcttggaggggcctcttgaggaacttttaatttgcaggggtgcccgctatggacggggcattccagctgagacactgtgattttaaattaaatctttgtggtctt

SEQ ID NO: 57 - DNA, 6711 bp, Homo sapiens
  misc_feature (7)..(10): n is a, c, g, or t
  misc_feature (12)..(14): n is a, c, g, or t
  misc_feature (42)..(42): n is a, c, g, or t
  misc_feature (48)..(48): n is a, c, g, or t
  misc_feature (50)..(50): n is a, c, g, or t
  misc_feature (315)..(315): n is a, c, g, or t
  misc_feature (665)..(665): n is a, c, g, or t
  misc_feature (1965)..(1965): n is a, c, g, or t
  misc_feature (3509)..(3509): n is a, c, g, or t
  misc_feature (3512)..(3513): n is a, c, g, or t
  misc_feature (3516)..(3516): n is a, c, g, or t
  misc_feature (3755)..(3756): n is a, c, g, or t
  misc_feature (3886)..(3886): n is a, c, g, or t
  misc_feature (4385)..(4385): n is a, c, g, or t
  misc_feature (4387)..(4387): n is a, c, g, or t
  misc_feature (4389)..(4391): n is a, c, g, or t
  misc_feature (4393)..(4395): n is a, c, g, or t
  misc_feature (4397)..(4401): n is a, c, g, or t
  misc_feature (4406)..(4408): n is a, c, g, or t
  misc_feature (4683)..(4683): n is a, c, g, or t
  misc_feature (5009)..(5009): n is a, c, g, or t
  misc_feature (5040)..(5040): n is a, c, g, or t
  misc_feature (6708)..(6708): n is a, c, g, or t
tccactnnnncnnncctccaccgtccgggagccgccgccacngccgcngnggagtcaggaagttcaagatggccgccgcggagacccagtcgctacgggagcagccagagatggaagatgctaattctgaaaagagtataaatgaagaaaatggagaagtatcagaagaccagtctcaaaataagcacagtcgtcacaaaaaaaagaagcataaacacagaagtaaacataagaaacataaacattcctcagaagaagacaaggataaaaaacataaacataagcataaacataagaaacacaaaagaaaagagnttattgatgcttctgataaagagggtatgtctccagcaaaaagaactaaacttgatgatttagctttgctagaagacttggaaaaacagagagccttgattaaggccgaacttgataatgagttaatggaaggaaaggtccagtctggtatggggctcattttgcaaggttatgagtctggctctgaagaagagggggaaattcatgaaaaggcaagaaatggaaataggtctagtactagatcttcaagtacaaaggggaaacttgaacttgtggacaataaaattactacaaagaaacgaagtaaaagcagatccaaagaacggactagacataggtctgataaaaanaaaagtaaggggggtattgaaatcgttaaagagaaaacaactaggagcaagtcaaaggagaggaaaaaatctaaaagcccatccaaaagaagtaagtctcaagatcaagcaaggaaatcaaaatcccctacccttagaaggcgatctcaagagaaaattggtaaggccagatctcctactgatgataaggttaaaattgaagataaaagtaaatcaaaagataggaaaaaatccccaattataaatgaaagtagaagtcgcgatcgaggtaaaaaatccagatccccagttgatttaagaggtaaatccaaagacagaaggtcacggtccaaagagagaaaatcaaaacggtctgaaactgataaagaaaagaagccaattaaatctccctctaaagatgcttcatctgggaaagaaaataggtcacccagcagaagacctggtcgtagtcctaaaagaagaagtttgtctccaaaaccacgtgataaatcaagaagaagcaggtctccacttttgaatgatagaagatctaagcagagcaaatccccctcgcggacactgtctcctgggagaagagccaagagccgatccttagaaagaaaacgacgagaaccagagaggagacgactttcttctccaagaacacgacctcgagatgatatcctcagtagacgtgaaagatcaaaagatgccagccccatcaatagatggtctccaacccgaagaagaagtagatctcccattagaaggaggtctcgttccccactcagacgtagcaggtctccaagaagaagaagcagatctcctcggagaagggacagaggtcggaggagcagatcacgcttgcgaaggcggtctcgatcacgcggtggtcgtagacgaaggagcagaagcaaagtaaaggaagataaatttaaaggaagtctttctgaaggaatgaaagttgagcaggaatcttcgtctgatgataaccttgaagactttgatgtagaggaagaagatgaagaagccctaatagaacagagaagaatccaaaggcaggcaattgttcagaaatataaataccttgctgaagatagcaacatgtctgtgccatctgaaccaagcagcccccagagcagtacgagaacacgatcaccatctccagatgacattctggagcgagtagctgctgatgttaaagagtatgaacgggaaaatgttgatacatttgaggcctcagtgaaagccaagcataatctaatgacagttgaacagaataatggttcatctcagaagaagttgttggcacctgatatgnttacagaatctgatgatatgtttgctgcgtattttgatagtgctcgtcttcgggccgctggcattggaaaagatttcaaagagaatcccaacctcagagataactggaccgatgcagaaggctattatcgtgtgaacataggtgaagtcctagataaacgttacaatgtgtatggctacactgggcaaggtgtattcagtaatgttgtacgagccagagataatgcaagagccaaccaagaagtggctgtaaagatcatcagaaacaatgagctcatgcaaaagactggtttaaaagaattagagttcttgaaaaaacttaatgatgctgatcctgatgacaaatttcattgtctgagactcttcaggcacttctatcacaagcagcatctttgtctggtattcgagcctctcagcatgaacttacgagaggtgttaaaaaaatatggtaaagatgttggtcttcatattaaagctgtaagatcctatagtcagcagttgttcctggcattgaaactccttaaaagatgcaatatcctacatgcagatatcaagccagacaatatcctggttaatgaatccaaaactattttaaagctttgcgattttgggtcggcttcacatgttgcggataatgacataacaccttatcttgtcagtagattttatcgtgctcctgaaatcattataggtaaaagctatgactatggtatagatatgtggtctgtaggttgcaccttatacgaactctatactggaaaaattttattccctggcaaaaccaataaccatatgctgaagcttgcaatggatctcaaaggaaagatgccaaataagatgattcgaaaaggtgtgttcaaagatcagcattttgatcaaaatctcaacttcatgtacatagaagttgataaagtaacagagagggagaaagttactgttatgagcaccattaatccaactaaggacctgttggctgacttgattgggtgccagagacttcctgaagaccaacgtaagaaagtacaccagctaaaggacttgttggaccagattctgatgttggacccagctaaacgaattagcatcaaccaggccctacagcacgccttcatccaggaaaaaatttaaacaagatgaagaaactccaagggtttgagtaaatacaaagactgaagaaatttcacagcagtttcattaatgtatataaacttataaatatttctccagcaaatttgaggaagcatgatatatttgaattaacaccaagggtgatatttcttttagagatgttagttaatctgttttgtgtcttacgtgaaatttcactgtagactgttttaaattgccaagactgcacaaaattacagtgctaatgtatatggttgcagttcacataaagacaaaagcatctgttatgaaatgagtagtaatattgggtggttgatttgttcttagcagacttggcttcattttggtcttgagataaaatggccagcataaatgctgtttatattcacgttttcctaggtgtgtgtgtgcaggccncannagnatgcccttggtgtagtcagtgccgaaaggggtctgttccttcttgagcctgcctgcagggatggtctccttttaaagcaggttgtgtgcagcattcagtacactgaaggtaagctaaaccatcaacatctctggtgttttaagatgttattttattggaacaactgacaaatgagggatgttagctttgtggcagaattccctgcatgtgtgataactgatcttgttttattttttggnnattgcaactgtggcatagttacaatttctgtttgttcatcacatttaaaattggaagagaacgcgcttgatggatagagcgccttcagtgtactgtttcttattaactttactttttttaaatcaacttngctatagactttatatacattttgttaaatatagttcctagtgacatagaaacgatgcgtagttttcatttactaattacaaatgttgaggcctaattctgaaagtcctcatatttaaaggctagacaacgtaatgaaatttttaactatttgtatgtcattttgaaagtgtactgctttatggtaaaagtgtttttcatttgttcattgttttcattatttgtgatcatgttgtctttcaatacaggcataaaccttccactcttgaacaaagcagctgctttttaaaagcggtaattgcttctttaccttttatttcttttgtaaatgaagcttttctttaagaatgtgactttaaagtgttgtctattgcataaaacagttgacactcacttattgtaaagtgaagattgttctactgcatgtgaagtggaccatgcagatttctgtatgttctcagtatgcatcactagataataaagtcttttgtgaacaaggnanannnannnannnnnaaaannntttgtcttcagtgctggtaagtcaggtaaaccataaatagttaaaagcaaccttttgtttttttcctgaaagtttttaattgaaagtattattagttaaagatgtaaacctagccaaaattaccagtttattaataattaggatcctaattatttcaaaaaatcctacaaatattgtcagctttcagtgtagtgagattattcctgtaggttatggggtataattcaggatttaactaatgtttctgctattttctcacttttccttttgatggntgcggaaagagaaaaaggaaaacggggcacaggccattcgacgccttctccaaggggtctgatttgctgagacaccagcttcaccttcttaacaaggtgcagctcagtggaagatgatgacaaccagaagacatgagctaaggtttctgtcctataaaagatttattaaaaaacaatccttcatttattttttgtctaattttttagttttcagcattatgatttgggttttattggtgtttggtatttagaattagtgctgttgtggagtgcgtctgtaaagtgcttgttttatcatacttcctgcctctcccctcccccagttntctcctcccctaaaataaaaatagtggtcanctttagtaatataaaaggctgctggatgctgagattccacataacacatggttgtcaaaattggatgttaaggattcttagaaaaacagcaaccaccagaatagcatatatctaaaagtagtcttcagctttaggcagatgcaaaagaatacaaactggaatattaagaatactgttcaactcctttagtatctgttccccaacttaccctgtagaaacctcgttattaaccagtgttccagtcttaaagtagacaaaatattcagagccattttttttaagggaaatgaaaaagatactctgggttttttatactccccaatttagcatatctagactacctatttgaaaggaaccctatcaactgtcttatgtacgttacatgattttcctacactctgtaattttgctgaggtgcaatttggaactctgcaagacctactagattgaatttatttagtgaatgctcctgaataaatgtgcattcctcttttagagtagctgtatgcttttcaaatgctatctgccgtgaattttttgcttttattatactttatggcaaaagtgatatcaagtgattgtcagacttgagggctcatagaagtgttaggtacggctctcaaagatgttacagttttttctagggttgggagaatagttgagatctggaaagcatagacattttttacactctggatagactttattcttgaagatcatcagaaatgaggttggaatttcgaggttttgagcagggggagcatcttatattcacccttaaatcgttattaatacatcctgttttcttcattccctgatagctatctcatttcactctactgtctcaaaattttgttttaaaataatagaaatgttttgccattattaagtaccactttattcctaacaaaaataagtactcaggacttttttttcaaaatgaaatatttatgtactgttttatggtatgtggtagagtaagtaaaatgtaatgttctcagttttgttccatatttgcattcctcttatgctttacctgtattttatcatttgtaagcagaactctagctatatggggtagaaataaaatctctgagatgaaacaaaggaatcaacatgataaaatttaggcgaagtagttaagaaatggcccttttgaatgttgaagataggaaagaaagccatatattcaaatatgtaattttcctcatttagttataatgacatctttaccaattgggcttcataaatgtgtttctttcttaatagtatcctagttccagcatatattcaacatgaattttatcattctcctcctaatggaatgtcttccttatagaaatgttcacgacaaattcatttgtgttttttacatgtcaataatgtatgctaaattaaaatgttttccagttattctgatagatgtcattatggcatccttaatttttcttctccttctgtatatagggtaagggactgttctgaagaacctttccatttagtgatcaagatatggaagctgatttctgaaaatgctcagtgtgtactctaattatttatggtaccatttgaattgtaacttgcattttagcagtgcatgtttctaattgacttactgggaaactgaataaaatatgcctcttattatcaaaaaaaaaaaaaaaaaanact

SEQ ID NO: 58 - DNA, 3027 bp, Homo sapiens
tctctctcggcgtttccgctgtcagggcctgcggtgtgactcgcgggctcagctggtccggccgtagcacctccgcgccgtcgccatgtcgcggtttttcaccaccggttcggacagcgagtccgagtcgtccttgtccggggaggagctcgtcaccaaacctgtcggaggcaactatggcaaacagccattgttgctgagcgaggatgaagaagataccaagagagttgtccgcagtgccaaggacaagaggtttgaggagctgaccaaccttatccggaccatccgtaatgccatgaagattcgtgatgtcaccaagtgcctggaagagtttgagctcctgggaaaagcatatgggaaggccaaaagcattgtggacaaagaaggtgtcccccggttctatatccgcatcctggctgacctagaggactatcttaatgagctttgggaagataaggaagggaagaagaagatgaacaagaacaatgccaaggctctgagcaccttgcgtcagaagatccgaaaatacaaccgtgatttcgagtcccatatcacaagctacaagcagaaccccgagcagtctgcggatgaagatgctgagaaaaatgaggaggattcagaaggctcttcagatgaggatgaggatgaggacggagtcagtgctgcaactttcttgaagaagaaatcagaagctccttctggggagagtcgcaagttcctcaaaaagatggatgatgaagatgaggactcagaagattccgaagatgatgaagactgggacacaggttccacatcttccgattccgactcagaggaggaagaagggaaacaaaccgcgctggcctcaagatttcttaaaaaggcacccaccacagatgaggacaagaaggcagccgagaagaaacgggaggacaaagctaagaagaagcacgacaggaaatccaagcgcctggatgaggaggaggaggacaatgaaggcggggagtgggaaagggtccggggcggagtgccgttggttaaggagaagccaaaaatgtttgccaagggaactgagatcacccatgctgttgttatcaagaaactgaatgagatcctacaggcacgaggcaagaagggaactgatcgtgctgcccagattgagctgctgcaactgctggttcagattgcagcggaaaacaacctgggagagggcgtcattgtcaagatcaagttcaatatcatcgcctctctctatgactacaaccccaacctggcaacctacatgaagccagagatgtgggggaagtgcctggactgcatcaatgagctgatggatatcctgtttgcaaatcccaacatttttgttggagagaatattctggaagagagtgagaacctgcacaacgctgaccagccactgcgtgtccgtggctgcatcctaactctggtggaacgaatggatgaagaatttaccaaaataatgcaaaatactgaccctcactcccaagagtacgtggagcacttgaaggatgaggcccaggtgtgtgccatcatcgagcgtgtgcagcgctacctggaggagaagggcactaccgaggaggtctgccgcatctacctgctgcgcatcctgcacacctactacaagtttgattacaaggcccatcagcgacagctgaccccgcctgagggctcctcaaagtctgagcaagaccaggcagaaaatgagggcgaggactcggctgtgttgatggagagactgtgcaagtacatctacgccaaggaccgcacagaccggatccgcacatgtgccatcctctgccacatctaccaccatgctctgcactcgcgctggtaccaggcccgcgacctcatgctcatgagccacttgcaggacaacattcagcatgcagacccgccagtgcagatcctttacaaccgcaccatggtgcagctgggcatctgtgccttccgccaaggcctgaccaaggacgcacacaacgccctgctggacatccagtcgagtggccgagccaaggagcttctgggccagggcctgctgctgcgcagcctgcaggagcgcaaccaggagcaggagaaggtggagcggcgccgtcaggtccccttccacctgcacatcaacctggagctgctggagtgtgtctacctggtgtctgccatgctcctggagatcccctacatggccgcccatgagagcgatgcccgccgacgcatgatcagcaagcagttccaccaccagctgcgcgtgggcgagcgacagcccctgctgggtccccctgagtccatgcgggaacatgtggtcgctgcctccaaggccatgaagatgggtgactggaagacctgtcacagttttatcatcaatgagaagatgaatgggaaagtgtgggaccttttccccgaggctgacaaagtccgcaccatgctggttaggaagatccaggaagagtcactgaggacctacctcttcacctacagcagtgtctatgactccatcagcatggagacgctgtcagacatgtttgagctggatctgcccactgtgcactccatcatcagcaaaatgatcattaatgaggagctgatggcctccctggaccagccaacacagacagtggtgatgcaccgcactgagcccactgcccagcagaacctggctctgcagctggccgagaagctgggcagcctggtggagaacaacgaacgggtgtttgaccacaagcagggcacctacgggggctacttccgagaccagaaggacggctaccgcaaaaacgagggctacatgcgccgcggtggctaccgccagcagcagtctcagacggcctactgagctctccactctgtttcccgcctgggccatccaaccttgaagtcctaaaccacacctcagtcactaaaggtctgtttaaagttgttctggttgattgcttgttgccacaaaggtgtgttgagcccattcatttgctgattatacttctgagctgctaccacatgacagacacaaggctcagatgaagaggtgaattgaac

SEQ ID NO: 59 - DNA, 1507 bp, Homo sapiens
ggcacgagggggccctgcggtgtgactcgcgggctcagctggtccggccgtagcacctccgcgccgtcgccatgtcgcggtttttcaccaccggttcggacagcgagtccgagtcgtccttgtccggggaggagctcgtcaccaaacctgtcggaggcaactatggcaaacagccattgttgctgagcgaggatgaagaagataccaagagagttgtccgcagtgccaaggacaagaggtttgaggagctgaccaaccttatccggaccatccgtaatgccatgaagattcgtgatgtcaccaagtgcctggaagagtttgagctcctgggaaaagcacatgtgccatcctctgccacatctaccaccatgctctgcactcgcgctggtaccaggcccgcgacctcatgctcatgagccacttgcaggacaacattcagcatgcagacccgccagtgcagatcctttacaaccgcaccatggtgcagctgggcatctgtgccttccgccaaggcctgaccaaggacgcacacaacgccctgctggacatccagtcgagtggccgagccaaggagcttctgggccagggcctgctgctgcgcagcctgcaggagcgcaaccaggagcaggagaaggtggagcggcgccgtcaggtccccttccacctgcacatcaacctggagctgctggagtgtgtctacctggtgtctgccatgctcctggagatcccctacatggccgcccatgagagcgatgcccgccgacgcatgatcagcaagcagttccaccaccagctgcgcgtgggcgagcgacagcccctgctgggtccccctgagtccatgcgggaacatgtggtcgctgcctccaaggccatgaagatgggtgactggaagacctgtcacagttttatcatcaatgagaagatgaatgggaaagtgtgggaccttttccccgaggctgacaaagtccgcaccatgctggttaggaagatccaggaagagtcactgaggacctacctcttcacctacagcagtgtctatgactccatcagcatggagacgctgtcagacatgtttgagctggatctgcccactgtgcactccatcatcagcaaaatgatcattaatgaggagctgatggcctccctggaccagccaacacagacagtggtgatgcaccgcactgagcccactgcccagcagaacctggctctgcagctggccgagaagctgggcagcctggtggagaacaacgaacgggtgtttgaccacaagcagggcacctacgggggctacttccgagaccagaaggacggctaccgcaaaaacgagggctacatgcgccgcggtggctaccgccagcagcagtctcagacggcctactgagctctccactctgtttcccgcctgggccatccaaccttgaagtcctaaaccacacctcagtcactaaaggtctgtttaaagttaaaaaaaaaaaaaaaaaaaaaaaaaaaaaaaaaaaaaaaa

SEQ ID NO: 60 - DNA, 3144 bp, Homo sapiens
  misc_feature (2835)..(2835): n is a, c, g, or t
  misc_feature (2868)..(2868): n is a, c, g, or t
  misc_feature (3048)..(3048): n is a, c, g, or t
agtttttgggcctcgtgcttcgtggtgggagacccaggtcgaggtccgggtggggccggtgaggggttgggcgtcgggaggtgttggctcgggcctcttcgcgtggccggtgacgccttggctcccccgcaggtccggccgtagcacctccgcgccgtcgccatgtcgcggtttttcaccaccggttcggacagcgagtccgagtcgtccttgtccggggaggagctcgtcaccaaacctgtcggaggcaactatggcaaacagccattgttgctgagcgaggatgaagaagataccaagagagttgtccgcagtgccaaggacaagaggtttgaggagctgaccaaccttatccggaccatccgtaatgccatgaagattcgtgatgtcaccaagtgcctggaagagtttgagctcctgggaaaagcatatgggaaggccaaaagcattgtggacaaagaaggtgtcccccggttctatatccgcatcctggctgacctagaggactatcttaatgagctttgggaagataaggaagggaagaagaagatgaacaagaacaatgccaaggctctgagcaccttgcgtcagaagatccgaaaatacaaccgtgatttcgagtcccatatcacaagctacaagcagaaccccgagcagtctgcggatgaagatgctgagaaaaatgaggaggattcagaaggctcttcagatgaggatgaggatgaggacggagtcagtgctgcaactttcttgaagaagaaatcagaagctccttctggggagagtcgcaagttcctcaaaaagatggatgatgaagatgaggactcagaagattccgaagatgatgaagactgggacacaggttccacatcttccgattccgactcagaggaggaagaagggaaacaaaccgcgctggcctcaagatttcttaaaaaggcacccaccacagatgaggacaagaaggcagccgagaagaaacgggaggacaaagctaagaagaagcacgacaggaaatccaagcgcctggatgaggaggaggaggacaatgaaggcggggagtgggaaagggtccggggcggagtgccgttggttaaggagaagccaaaaatgtttgccaagggaactgagatcacccatgctgttgttatcaagaaactgaatgagatcctacaggcacgaggcaagaagggaactgatcgtgctgcccagattgagctgctgcaactgctggttcagattgcagcggaaaacaacctgggagagggcgtcattgtcaagatcaagttcaatatcatcgcctctctctatgactacaaccccaacctggcaacctacatgaagccagagatgtgggggaagtgcctggactgcatcaatgagctgatggatatcctgtttgcaaatcccaacatttttgttggagagaatattctggaagagagtgagaacctgcacaacgctgaccagccactgcgtgtccgtggctgcatcctaactctggtggaacgaatggatgaagaatttaccaaaataatgcaaaatactgaccctcactcccaagagtacgtggagcacttgaaggatgaggcccaggtgtgtgccatcatcgagcgtgtgcagcgctacctggaggagaagggcactaccgaggaggtctgccgcatctacctgctgcgcatcctgcacacctactacaagtttgattacaaggcccatcagcgacagctgaccccgcctgagggctcctcaaagtctgagcaagaccaggcagaaaatgagggcgaggactcggctgtgttgatggagagactgtgcaagtacatctacgccaaggaccgcacagaccggatccgcacatgtgccatcctctgccacatctaccaccatgctctgcactcgcgctggtaccaggcccgcgacctcatgctcatgagccacttgcaggacaacattcagcatgcagacccgccagtgcagatcctttacaaccgcaccatggtgcagctgggcatctgtgccttccgccaaggcctgaccaaggacgcacacaacgccctgctggacatccagtcgagtggccgagccaaggagcttctgggccagggcctgctgctgcgcagcctgcaggagcgcaaccaggagcaggagaaggtggagcggcgccgtcaggtccccttccacctgcacatcaacctggagctgctggagtgtgtctacctggtgtctgccatgctcctggagatcccctacatggccgcccatgagagcgatgcccgccgacgcatgatcagcaagcagttccaccaccagctgcgcgtgggcgagcgacagcccctgctgggtccccctgagtccatgcgggaacatgtggtcgctgcctccaaggccatgaagatgggtgactggaagacctgtcacagttttatcatcaatgagaagatgaatgggaaagtgtgggaccttttccccgaggctgacaaagtccgcaccatgctggttaggaagatccaggaagagtcactgaggacctacctcttcacctacagcagtgtctatgactccatcagcatggagacgctgtcagacatgtttgagctggatctgcccactgtgcactccatcatcagcaaaatgatcattaatgaggagctgatggcctccctggaccagccaacacagacagtggtgatgcaccgcactgagcccactgcccagcagaacctggctctgcagctggccgagaagctgggcagcctggtggagaacaacgaacgggtgtttgaccacaagcagggcacctacgggggctacttccgagaccagaaggacggntaccgcaaaaacgagggctacatgcgccgcggnggctaccgccagcagcagtctcagacggcctactgagctctccactctgtttcccgcctgggccatccaaccttgaagtcctaaaccacacctcagtcactaaaggtctgtttaaagttgttctggttgattgcttgttgccacaaaggtgtgttgagcccattcatttgctgattatanttctgagctgctaccacatgacagacacaaggctcagatgaagaggtgaattgaacacgttcctgacctcaaaaaaaacaaaaaaaaaaaaaaaaa

SEQ ID NO: 61 - DNA, 1097 bp, Homo sapiens
ggcacgagggatggtggacagcgtgtaccggacccgctccctgggggtggcggccgaagggctcccggaccagtacgcggacggggaggcggcgcgcgtgtggcagctgtatatcggagacacccgcagccgcaccgccgagtacaaggcatggctgcttgggctgctgcgccagcacggctgccagcgggtgctcgacgtagcctgtggcactggggtggactccattatgctggtggaagagggcttcagtgtgacgagtgtggatgccagtgacaagatgctgaagtatgcacttaaggagcgctggaaccggcggcacgagcccgccttcgacaagtgggtcatcgaagaagccaactggatgactctggacaaagatgtgccccagtcagcagagggtggctttgatgctgtcatctgccttggaaacagtttcgctcacttgccagactgcaaaggggaccagagtgagcaccggctggcgctgaaaaacattgcgagcatggtgcgggcagggggcctactggtcattgatcatcgcaactacgaccacatcctcagtacaggctgtgcacccccagggaagaacatctactataagagtgacttgaccaaggacgtcacaacatcagtgctgatagtgaacaacaaggcccacatggtgaccctggactatacggtgcaggtgccgggggctggccaggatggctctcctggcttgagtaagttccggctctcctactacccacactgtctggcatccttcacggagctgctccaagcagccttcggaggtaagtgccagcacagcgtcctgggcgacttcaagccttacaagccaggccaaacctacattccctgctacttcatccacgtgctcaagaggacagactgagtgtggcctcagctcccacaagcctctgcccaggcactgctaggctctgtctggaagatggggaccagcagccccacaccagggccagcctctagagcagactacagctggggtgcagggatgtgggttccacagacggaagggtaaacaatatagtctttttcagttcctgcaaaaaaaaaaaaaaaaaaaaaaaaaa

SEQ ID NO: 62 - DNA, 2561 bp, Homo sapiens
  misc_feature (697)..(697): n is a, c, g, or t
  misc_feature (708)..(708): n is a, c, g, or t
  misc_feature (776)..(776): n is a, c, g, or t
  misc_feature (1425)..(1426): n is a, c, g, or t
  misc_feature (1429)..(1431): n is a, c, g, or t
  misc_feature (1566)..(1566): n is a, c, g, or t
  misc_feature (1570)..(1570): n is a, c, g, or t
  misc_feature (2427)..(2430): n is a, c, g, or t
  misc_feature (2458)..(2474): n is a, c, g, or t
  misc_feature (2477)..(2478): n is a, c, g, or t
  misc_feature (2480)..(2481): n is a, c, g, or t
gccggacgcgaggggcggggcgagcgcgggacaaagggaagcgaagccggagctgcgggcgctttttctgcccgcggtgtctcagattcattcttaaggaactgagaacttaatcttccaaaatgtcaaaaagaccatcttatgccccacctcccaccccagctcctgcaacacaaatgcccagcacaccagggtttgtgggatacaatccatacagtcatctcgcctacaacaactacaggctgggagggaacccgggcaccaacagccgggtcacggcatcctctggtatcacgattccaaaacccccaaagccaccagataagccgctgatgccctacatgaggtacagcagaaaggtctgggaccaagtaaaggcttccaaccctgacctaaagttgtgggagattggcaagattattggtggcatgtggcgagatctcactgatgaagaaaaacaagaatatttaaacgaatacgaagcagaaaagatagagtacaatgaatctatgaaggcctatcataattcccccgcgtaccttgcttacataaatgcaaaaagtcgtgcagaagctgctttagaggaagaaagtcgacagagacaatctcgcatggagaaaggagaaccgtacatgagcattcagcctgctgaagatccagatgattatgatgatggcttttcaatgaagcatacagnccaccgcccgntttccagagaaaccaccgcctcatcagtgaaattcttagtgagagtgtggtgccagacgttcggtcangttgtcacaacagctagaatgcaggtcctcaaacggcaggtccagtccttaatggttcatcagcgaaaactagaagctgaacttcttcaaatagaggaacgacaccaggagaagaagaggaaattcctggaaagcacagattcatttaacaatgaacttaaaaggttgtgcggtctgaaagtagaagtggatatggagaaaattgcagctgagattgcacaggcagaggaacaggcccgcaaaaggcaggaggaaagggagaaggaggccgcagagcaagctgagcgcagtcagagcagcatcgttcctgaggaagaacaagcagctaacaaaggcgaggagaagaaagacgacgagaacattccgatggagacagaggagacacaccttgaagaaacaacagagagccaacagaatggtgaagaaggcacgtctactcctgaggacaaggagagtgggcaggagggggtcgacagtatggcagaggaaggaaccagtgatagtaacactggctcggagagcaacagtgcaacagtggaggagccaccaacagatcccataccagaagatgagaaaaaagaataagtgttgccttgttttgtgtgttctaaatactttttttaatgaaaaaatgttttttggttttaanngtnnnacgtggtttgtgtattaattttttttcttgtccatatcacaccaccaaaggcttttggaccatttagcatcatgagcctaatggctcagtcagtcacctttcttaagtgttgtgaagatggctcttttctttggntctntgtttctagccctcaactgctgaaagcctcagaatttagattaattgagaaaacacccacctcttttagagaattatcctttgatgctgcagaatctactcttacaatgccttcctacagctcactggggtgcttaccaaagccatagctttaaaccttcccagtccccatcagtagcttcctgaaagtctcctctcttgtttacttctgcaaagggtagcttcttaaaaacgtgatcatgtatgagtatgtatttgttcacttacccttttttacttttaatcaatgtcagataccaagagttgtgttaagctgagtgtagtgtgtaactaactacacttggatcttactgatccagaaatagtccccatagttagagtagttacttatgaagtggttattaaagtgaacacagcacatatacattatctatactgctttttgttatgattaatactgggtatgttctggtaaatccatccttattgtatagaaaaaaaattacttttttaccaggttttccaaagacagaatagatcacaaagctcaaggaatttaatattcttgtaatggactagataattcaaactgattagcccattccagaagaaaaacagctgggaattaagttaatccacttgaaattgttttacaataatcagaacatccaaacctcaaggctcaggatcccatagaccagagcccacctttttgataaacttagtaaagtcttggagactagaagcaagatagtttgtgacacataagcttcccaaaaactagaatagatttttactgaatagtggtatatctgatggtatatgtttcttaaaggtccaaatgtaataaaaaaaaannnnaaaaaaaaaaaaaaaaaaaaaaaaaaannnnnnnnnnnnnnnnnagnngnnggcggccgctctagaggatccaagcttacgtacgcgtgcatgcgacgtcatagctcttctatagtgtcacctaaattcaa

SEQ ID NO: 63 - DNA, 2262 bp, Homo sapiens
  misc_feature (1687)..(1687): n is a, c, g, or t
  misc_feature (2059)..(2059): n is a, c, g, or t
atgaagactgtgctcatggttgctgaaaagccgtccttggcacagtcaattgccaaaatcctctctagagggagcctgtcctcacacaaagggctgaacggggcctgctcagtccacgagtacactgggacctttgctggccagccagtgcgcttcaagatgacgtctgtctgtggtcacgtgatgaccctggatttcctgggaaaatacaacaaatgggacaaagtggaccccgcagaactgttcagccaagctcccacggagaagaaagaagctaaccccaagctgaacatggtgaagttcctgcaggtggagggcagaggctgcgactacatcgtgctgtggctggactgcgacaaggagggggagaacatctgctttgaggttcttgatgctgttctgcccgtcatgaacaaggcccatggtggcgagaagaccgtgttccgggccaggtttagctccatcacggacacagacatctgtaatgccatggcctgcctaggcgagcctgaccacaacgaggcgctctcagtggatgctcgccaggagctggacctgcgaatcggctgtgcattcaccagctctctcatctcctttgggccgtgtcagactccaaccctgggattctgtgtggagagacatgataaaatccagtccttcaaaccagagacctactgggtgctgcaggccaaggttaacactgacaaagacagatctctccttttggactgggaccgagtaagagtgtttgaccgggagatcgcacagatgtttttaaacatgacaaagctggagaaggaagcccaggtggaggccacaagcaggaaagaaaaggccaagcagaggcccctggccctgaacactgtggagatgctgcgcatggggccgcagcacgccatgcagacggctgagcggctctacacgcaaggctacatcagctacccacggacagagaccacccactaccctgagaactttgacctgaagggctctctgcggcagcaggccaaccacccctactgggccgacacggtgaagcggttgttagcagaaggtatcaaccgcccgcggaaaggccatgacgccggcgaccatccccccatcacccccatgaagtctgccacagaggccgaattaggtaccgctctcatcccatacccggtgtgcttccagggagggaagggcgagctgcgacaacacttcatcgccacggtcagccatgactgcaagtacctgcagagcaccatctccttcagaattgggcccgagctcttcacctgctccgggaagaccgtcctctcaccaggtcacaccacgggcccagccttcctcctctgtgccttcatgggcagacaaacattctacatcgtgtctggggatgggaggcccaggagcgtgcccctggaggagagcctgcccacttgccagcggggtgatgccttccctgtgggcgaggtgaagatgctggagaagcagacgaacccacccgactacctgacggaggccgagctcatcacgctcatggagaagcatggcatcggcacggatgccagcatccctgtgcatatcaacaacatctgccagcgcaactatgtcacggtggagagcgggcgccggctcaagcccaccaacctcggcatcgtcctggtgcacggctactataagattgatgcagagctggtgctcnccaccatccgcagtgcagtggagaagcagctgaacctgatcgcccagggcaaggccgactaccgccaggtcctgggccacaccctggacgtgttcaagaggaagttccactactttgtcgactccattgctggcatggatgagttgatggaggtgtctttctcgcccctggcggccacaggcaagcccctctcacgctgtgggaagtgccaccgcttcatgaagtacatccaggccaagccaagccgcctgcactgctcccactgcgatgagacctacacgctcccccagaacggcaccatcaagctctacaaggagctccgctgccctctggatgacttcgagctggtcctgtggtcatcaggctctcggngcaagagctacccgctgtgcccctactgctacaaccacccacccttccgagacatgaagaaagcagaaggaagcagaggagggaaccagaggtggcagtgtgagaaaggctcaactggccattgctggcttcgaggctgtaggaaggggccacgagccaagccgcccacccaaagctgcagaagagaagcaagaggctggtga

SEQ ID NO: 64 - DNA, 3431 bp, Homo sapiens
atggccccccgcaccctctggagctgctacctctgctgcctgctgacggcagctgcaggggccgccagctaccctcctcgaggtttcagcctctacacaggttccagtggggccctcagccccggggggccccaggcccagattgccccccggccagccagccgccacaggaactggtgtgcctacgtggtgacccggacagtgagctgtgtccttgaggatggagtggagacatatgtcaagtaccagccttgtgcctggggccagccccagtgtccccaaagcatcatgtaccgccgcttcctccgccctcgctaccgtgtggcctacaagacagtgaccgacatggagtggaggtgctgtcagggttatgggggcgatgactgtgctgagagtcccgctccagcgctggggcctgcgtcttccacaccacggcccctggcccggcctgcccgccccaacctctctggctccagtgcaggcagccccctcagtggactggggggagaaggtcctggggagtcagagaaggtgcagcagctggaggaacaggtgcagagcctgaccaaggagctgcaaggcctgcggggcgtcctgcaaggactgagcgggcgcctggcagaggatgtgcagagggctgtggagacggccttcaacgggaggcagcagccagctgacgcggctgcccgccctggggtgcatgaaaccctcaatgagatccagcaccagctgcagctcctggacacccgcgtctccacccacgaccaggagctgggtcacctcaacaaccatcatggcggcagcagcagcagtgggggcagcagggccccagccccagcctcagcccctccgggccccagtgaggagctgctgcggcagctggagcagcggttgcaggagtcctgctccgtgtgcctggccgggctagatggcttccgccggcagcagcaggaggacagggagcggctgcgagcgatggagaagctgctggcctcggtggaggagcggcaacggcacctcgcagggctggcggtgggccgcaggccccctcaggaatgctgctctccagagctgggccggcgactggcagagctggagcgcaggctggatgtcgtggccggctcagtgacagtgctgagtgggcggcgaggcacagagctgggaggagccgcggggcagggaggccaccccccaggctacaccagcttggcctcccgcctgtctcgcctggaggaccgcttcaactccaccctgggcccttcggaggagcaggaggagagctggcctggggctcctggggggctgagccactggctgcctgctgcccggggccgactagagcagttgggggggctgctggccaatgtgagcggggagctgggggggcggttggatctgttggaggagcaggtggcaggggccatgcaggcatgcgggcagctctgctctggggcccctggggagcaggactctcaagtcagcgagatcctcagtgccttggagcgcagggtgctggacagtgaggggcagctgcggctggtgggctccggcctgcacacggtggaagcagcgggggaggcccggcaggccacgctggagggattacaagaggttgtgggccggctccaggatcgtgtggatgcccaggatgagacagctgcagagttcacactacggctgaatctcactgcggcccggctaggccaactggaggggctgctgcaggcccatggggatgagggctgtggggcctgtggcggagtccaagaggaactaggccgccttcgggatggtgtggagcgctgctcctgccccctgttgcctcctcggggtcctggggctggtccaggtgttgggggcccaagccgtgggcccctggacggcttcagcgtgtttgggggcagctcaggctcagccctgcaggccctgcaaggagagctctctgaggttattctcagcttcagctccctcaatgactcactgaatgagctccagaccactgtggagggccagggcgctgatctggctgacctgggggcaaccaaggaccgtatcatttctgagattaacaggctgcagcaggaggccacagagcatgctacagagagtgaagagcgcttccgaggcctagaggagggacaagcacaggccggccagtgccccagcttagaggggcgattgggccgtcttgagggtgtctgtgaacggttggacactgtggctgggggactgcagggcctgcgcgagggcctttccagacacgtggctgggctctgggctgggctccgggaaaccaacaccaccagccagatgcaggcagccctgctggagaagctggtcgggggacaggcgggcctgggcaggcggctgggtgcccttaacagctccctgcagctcctggaggaccgtctgcaccagctcagcctgaaggacctcactgggcctgcaggagaggctgggcccccagggcctcctgggctgcagggacccccaggccctgctggacctccaggatcaccaggcaaggacgggcaagagggccccatcgggccaccaggtcctcaaggggaacagggagtggagggggcaccagcagcccctgtgccccaagtggcattttcagctgctctgagtttgccccggtctgaaccaggcacggtccccttcgacagagtcctgctcaatgatggaggctattatgatccagagacaggcgtgttcacagcgccactggctggacgctacttgctgagcgcggtgctgactgggcaccggcacgagaaagtggaggccgtgctgtcccgctccaaccagggcgtggcccgcgtagactccggtggctacgagcctgagggcctggagaataagccggtggccgagagccagcccagcccgggcaccctgggcgtcttcagcctcatcctgccgctgcaggccggggacacggtctgcgtcgacctggtcatggggcagctggcgcactcggaggagccgctcaccatcttcagcggggccctgctctatggggacccagagcttgaacacgcgtagactggggtcccgcccgacgtgtctacgtcggctgaagagacagcgggggcggcgggctcctggggtctcgcctgagacggggcacctagccctgggcgagcgccgcacccgggcccgcagcggcaccgcgcccagagcggcctctccccacgcccggggcgcgccggctcagggaggctcggggccgcccatgcagacttttggcctggcgcgatcccccaagaacccctccagggccggcctgcggaggagccgatcctcgcaccctccgctccctccactggccctccaggtcgattccctgggctccaggctcccccgcgcgggcgccgcccaccgccatactaaacgatcgaggaataaagacacttggtttttct

SEQ ID NO: 65 - DNA, 2610 bp, Homo sapiens
ccgaggcgaggcgcactctacccccagctcctaccctgtaagccccgccagcctccggacgtgctgtcctgggcccgtcgccctcggggtcccgccggaactccttcactctcagaggccgagtccctcccctccccacggctgcgtgtggccgttgcgtctgcacccagaccctgaggccgcccggccggccatggaggtggcgcccgagcagcccggctggatggcgcacccggccgtgctgaatgcgcagcaccccgactcacaccacccgggcctggcgcacaactacatggaacccgcgcacgtgctgcctccagacgaggtggacgtcttcttcaatcacctcgactcgcagggcaacccctactatgccaaccccgctcagcgcggcgtctcctacagccccgcgcacgcccgcctgaccggaggccagatgtgccgcccacacttgttgcacagcccgggtttgccctggctggacgggggcaaagcagccctctctgcggcccaccacaaaacctggaccgtgagccccttctccaagacgccactgcacccctcagctgctggaggccctggaggccactctctgtgtacccaggggctgggggtgggaggggggagcagcgggagctcagtggcctccctcacccctacagcagcccactctggctcccaccttttcggcttcccaccacgccacccaaaggaactgtctcctgaccctagcaccacgggggcagcgtctccagcctcatcttccgcggggggtagttcagcccgaggagaggacaaggacggcgtcaagtaccaggcgtcactgacggagagcatgaagatggaaagtggccgtcccctgcgcccaggcctagctactatgggcacccagcctgctacacaccaccccatccccacctacccctcctatgtgccggcggctgcccacgactacagcagcggactcttccaccccgggagcttcctggggggaccggcctccagcttcacccctaagcagcgcagcaagactcgttcctgttcagaaggccgggagtgtgtcaactgtggggccacagcaacccctctctggcggcgggacggcaccggccactacctgtgcaatgcctgcggcttctaccacaagatgaagggccagaaccgaccactcatcaagcccaagcgaagactgtcggccgccagaagagccggcacctgttgtgcaaattgtcagacgacaaccaccaccttatggcgccgaaacgccaacggggaccctgtctgcaacgcctgtggcctctactacaagctgcacaatgttaacaggccactgaccatgaagaaggaagggatccagactcggaaccggaagatgtccaacaagtccaagaagagcaagaaaggggcggagtgcttcgaggagctgtcaaagtgcatgcaggagaagtcatcccccttcagtgcagctgccctggctggacacatggcacctatgggccacctcccgcccttcagccactccggacacatcctgcccactccgacgcccatccacccctcctccagcctctccttcggccacccccacccgtccagcatggtgaccgccatggggtagggaacagacggacgtcgaggaccgggcactcccgggatgggccgaccaaacccttaccagcccagcatttcccgaaccccgacaccactcctgccagcccgggctcggcccagcaccccctctcctggagggggcgcccagcagcctgccagcagttactgtgaatgttccccaccgctgagaggctgcctccgcacctgaccgctgcccaggtggggtttcctgcatggacagttgtttggagaacaacaaggacaactttatgtagagaaaaggaggggacgggacagacgaaggcaaccatttttagaaggaaaaaggattaggcaaaaataatttattttgctcttgtttctaacaaggcttggaaacttggtggtctgagctatcccaagtctccggttcttcctcgggattggcgggtccacttgccagggctctgggggcagatttgtggggacctcagcctgcaccctcttctcctctggcttccctctctgaaatagccgaactccaggctgggctgagcaaagccagagtggccacggccagggagggtgagctggtgcctgctttgacggccaggccctggagggcagagacaatcaccggcggtcctgcaggaattcgagctcggtaccctgcaacagattcccaggccagggctgggtcacaggaaggaaacaacattttcttgaaaggggaaacgtttccagatcctgtccctttggctttgaggccgaagctgctgtgactgtgtcccctttactgagcgcacagacagcctgtcttctcaggtggacccatgtaaatagatcctttttctgctaacccttcaaccccagaaggctgtgtcctgactgggtctcaggtccagactttactgtggctgtggatccttcccaaggtacagctgtatataaacgtgtcccgagcttagattctgtatgcggtgacggcggggtgtggtggcctgtgagccctggccaagg

SEQ ID NO: 66 - DNA, 2673 bp, Homo sapiens
ggcacgagggtgagcgccaggaaggtagcgaggccagcgtcgccccgggactcgctgctcaagtctgtctattgcctgccgccacatccatcctagcagggccccgtcgcccaccaggcggacaaaagcggtccgctgaacaccatgcggccgctcggcgtgccgcccaggctctgctggtgagcgccgccaccccgcgcccaggtcccgcgagcccgcctgccgcgcacctcgccctgctcccagctctactccaggccccgtccgcccgggggcgccgcccaccgcgcctcgctcgggccgttgccgtctgcacccagaccctgagccgccgccgccggccatggaggtggcgccggagcagccgcgctggatggcgcacccggccgtgctgaatgcgcagcaccccgactcacaccacccgggcctggcgcacaactacatggaacccgcgcagctgctgcctccagacgaggtggacgtcttcttcaatcacctcgactcgcagggcaacccctactatgccaaccccgctcacgcgcgggcgcgcgtctcctacagccccgcgcacgcccgcctgaccggaggccagatgtgccgcccacacttgttgcacagcccgggtttgccctggctggacgggggcaaagcagccctctctgccgctgcggcccaccaccacaacccctggaccgtgagccccttctccaagacgccactgcacccctcagctgctggaggccctggaggcccactctctgtgtacccaggggctgggggtgggagcgggggaggcagcgggagctcagtggcctccctcacccctacagcaacccactctggctcccaccttttcggcttcccacccacgccacccaaagaagtgtctcctgaccctagcaccacgggggctgcgtctccagcctcatcttccgcggggggtagtgcagcccgaggagaggacaaggacggcgtcaagtaccaggtgtcactgacggagagcatgaagatggaaagtggcagtcccctgcgcccaggcctagctactatgggcacccagcctgctacacaccaccccatccccacctacccctcctatgtgccggcggctgcccacgactacagcagcggactcttccaccccggaggcttcctggggggaccggcctccagcttcacccctaagcagcgcagcaaggctcgttcctgttcagaaggccgggagtgtgtcaactgtggggccacagccacccctctctggcggcgggacggcaccggccactacctgtgcaatgcctgtggcctctaccacaagatgaatgggcagaaccgaccactcatcaagcccaagcgaagactgtcggccgccagaagagccggcacctgttgtgcaaattgtcagacgacaaccaccaccttatggcgccgaaacgccaacggggaccctgtctgcaacgcctgtggcctctactacaagctgcacaatgttaacaggccactgaccatgaagaaggaagggatccagactcggaaccggaagatgtccaacaagtccaagaagagcaagaaaggggcggagtgcttcgaggagctgtcaaagtgcatgcaggagaagtcatcccccttcagtgcagctgccctggctggacacatggcacctgtgggccacctcccgcccttcagccactccggacacatcctgcccactccgacgcccatccacccctcctccagcctctccttcggccacccccacccgtccagcatggtgaccgccatgggctagggaacagatggacgtcgaggaccgggcactcccgggatgggtggaccaaacccttagcagcccagcatttcccgaaggccgacaccactcctgccagcccggctcggcccagcaccccctctcctggagggcgcccagcagcctgccagcagttactgtgaatgttccccaccgctgagaggctgcctccgcacctgaccgctgcccaggtggggtttcctgcatggacagttgtttggagaacaacaaggacaactttatgtagagaaaaggaggggacgggacagacgaaggcaaccatttttagaaggaaaaaggattaggcaaaaataatttattttgctcttgtttctaacaaggacttggagacttggtggtctgagctgtcccaagtcctccggttcttcctcgggattggcgggtccacttgccagggctctgggggcagatttgtggggacctcagcctgcaccctcttctcctctggcttccctctctgaaatagccgaactccaggctgggctgagccaaagccagagtggccacggcccagggagggtgagctggtgcctgctttgacgggccaggccctggagggcagagacaatcacgggcggtcctgcacagattcccaggccagggctgggtcacaggaaggaaacaacattttcttgaaaggggaaacgtctcccagatcgctcccttggctttgaggccgaagctgctgtgactgtgtccccttactgagcgcaagccacagcctgtcttgtcaggtggaccctgtaaatacatcctttttctgctaacccttcaaccccctcgcctcctactctgagacaaaaaaaaaaaaaaaaaaaaaaaaaaaaaaaaaaaaaaaaaaaaaaaaa

SEQ ID NO: 67 - DNA, 612 bp, Homo sapiens
  misc_feature (279)..(279): n is a, c, g, or t
  misc_feature (301)..(301): n is a, c, g, or t
  misc_feature (306)..(306): n is a, c, g, or t
  misc_feature (335)..(336): n is a, c, g, or t
ggacccagagtttgtcttctacgaccagctgaagcaagtgatgaatgcgtacagagtcaagccggccgtctttgacctgctcctggctgttggcattgctgcctacctcggcatggcctacgtggctgtccaggtgagcagtgcccaggctcagcacttcagcctcctctacaagaccgtccagaggctgctcgtgaaggccaagacacagtgacacagccacccccacagccggagcccccgccgctccacagtccctggggccgagcacgagttggnaggggaccctcttctcccgtcntgccntcgggttgcccgcctcctccagagacttnncaagggcccatcaccactggcctctgggcacttgtgctgagactctgggacccaggcagctgccaccttgtcaccatgagagaatttggggagtgcttgcatgctagccagcaggctcctgtctgggtgccacggggccagcattttggagggagcttccttccttccttcctggacaggtcgtcatgatggatgcactgactgaccgtctggggctcaggctggtgtgggatgcagccggccgatgagaaaataaagccatattgaatgatcaaa

SEQ ID NO: 68 - DNA, 505 bp, Homo sapiens
aagacgcggtcgtaagggctgaggatttttggtccgcacgctcctgctcctgactcaccgctgttcgctctcgccgaggaacaagtcggtcaggaagcccgcgcgcaacagccatggcttttaaggataccggaaaaacacccgtggagccggaggtggcaattcaccgaattcgaatcaccctaacaagccgcaacgtaaaatccttggaaaaggtgtgtgctgacttgataagaggcgcaaaagaaaagaatctcaaagtgaaaggaccagttcgaatgcctaccaagactttgagaatcactacaagaaaaactccttgtggtgaaggttctaagacgtgggatcgtttccagatgagaattcacaagcgactcattgacttgcacagtccttctgagattgttaagcagattacttccatcagtattgagccaggagttgaggtggaagtcaccattgcagatgcttaagtcaactattttaataaattgatgaccagtta

SEQ ID NO: 69 - DNA, 653 bp, Homo sapiens
  misc_feature (42)..(42): n is a, c, g, or t
  misc_feature (77)..(77): n is a, c, g, or t
  misc_feature (114)..(114): n is a, c, g, or t
  misc_feature (125)..(125): n is a, c, g, or t
  misc_feature (198)..(199): n is a, c, g, or t
  misc_feature (210)..(210): n is a, c, g, or t
  misc_feature (213)..(213): n is a, c, g, or t
  misc_feature (215)..(217): n is a, c, g, or t
  misc_feature (221)..(221): n is a, c, g, or t
  misc_feature (223)..(223): n is a, c, g, or t
  misc_feature (244)..(244): n is a, c, g, or t
  misc_feature (526)..(527): n is a, c, g, or t
  misc_feature (529)..(529): n is a, c, g, or t
  misc_feature (532)..(536): n is a, c, g, or t
gctttttgaggaagacgcggtcgtaagggctgaggatttttnggtccgcacgctcctgctcctgactcaccgctgtncgctctcgccgaggaacaagtcggtcaggaagcccgngcgcaacagcncatggcttttaaggataccggaaaaacacccgtggagccggaggtggcaattcaccgaattcgaatcaccctnnaacaagccgcnaancnnntaanantccttggaaaaggtgtgtgcntgacttgataagaggcgcaaaagaaaagaatctcaaagtgaaaggaccagttcgaatgcctaccaagactttgagaatcactacaagaaaaactccttgtggtgaaggttctaagacgtgggatcgtttccagatgagaattcacaagcgactcattgacttgcacagtccttctgagattgttaagcagattacttccatcagtattgagccaggagttgaggtggaagtcaccattgcagatgcttaagtcaactattttaataaattgatgaccagttnntnaannnnngttggttgttatattacagaatactggcagatttaggaatataaagggtgtactaatgagacttccacttttcagggtgggaatataatgggtatcttagaagtggtctattcctgt

SEQ ID NO: 70 - DNA, 2137 bp, Homo sapiens
ctaattcgggaaacgtgcaccttgactaattcggttttctgtggctacgagagcaggcttggcgggcggaggcgccagcggatgtctcatgcaaggatcgtctctgtggctaagcctcactttccgctccgcccgggtgctctctagagcccggtttttcgagtggcagtctccagggctgccgaatacagcagcgatggagaacggcaccgggccctacggagaagaacgtccacgtgaagtccaggagacgacagtcaccgagggggctgccaaaatcgcctttcccagtgccaacgaggtcttttataacccggtgcaggaattcaatcgggacctgacatgtgctgtgatcaccgagtttgctcgcattcagcttggggccaaaggaatccagatcaaggttccaggagagaaggacacgcaaaaagtggtcgtggacttgtcagagcaagaggaggaaaaggttgaactgaaagagagtgaaaacctggcctcaggagaccaacctcgcacagcggccgtgggggagatctgtgaggaaggcctgcatgtgctggaaggcctggcagcttcaggcctacgttccattcgatttgccctagaggtgcctgggctcagatctgtggttgcaaacgatgcctccacccgggctgtggatctcatacgccggaatgtccagctcaatgacgtggcccacctggtacagccgagccaagcagatgcccggatgctgatgtaccagcaccagagggtgtcggagaggtttgacgtcatcgatctggacccctatggcagcccagccaccttcctggatgcagctgtgcaggctgtgagtgaaggagggttgctgtgtgtgacctgcacagacatggcggtgttggcggggaacagcggggagacgtgctacagcaagtacggggccatggccctcaagagccgggcctgccacgagatggccctgagaatcgtcctgcacagcctggacctccgcgccaactgctaccagcgcttcgtggtgccgctgctcagcatcagcgctgacttctacgtgcgtgtttttgtccgtgtcttcaccggccaggccaaggtcaaggcctcagccagcaagcaggcgctggtgttccagtgtgtgggctgcggggccttccaccttcagcgtctcggcaaagcgtcaggagtccccagcggccgggccaagttctctgcagcctgtggtccccctgtgacccccgagtgtgaacactgtgggcaacgacaccagcttggtggccccatgtgggcagagcccatccatgacctggattttgtgggccgtgtcctggaggctgtgagcgctaaccccggccgcttccacacctcggagcggatccgaggggtcctgagcgtcatcactgaggagctcccggacgtgcctctgtactacaccctggaccagctgagcagcaccatccactgcaacacaccaagcctcctgcagttgcggtcggccctcctccacgctgacttccgggtctcactctcccacgcctgtaagaacgctgtgaagacggatgcccctgcctctgccctctgggacatcatgcgttgctgggagaaggaatgtccggtgaaacgggagcgactatcagagactagcccagcgttccgcattctcagtgtggagcccaggctgcaggccaacttcaccatccgggaagatgccaaccccagctcccgacagcgaggactcaagcgcttccaggctaacccggaggccaactggggtccccggcctcgtgcccggccagggggcaaggcggccgacgaagctatggaggagagacgcaggctgcttcagaacaagcggaaggagccgccggaagatgtggcccagcgggctgcccggctcaagacatttccttgcaagaggtttaaggagggcacctgtcaacgcggggaccagtgctgctactcccacagccccccgacacccagggtttctgctgatgctgcccctgactgtccagagacctccaaccagaccccccctggacctggggctgccgctgggccaggcatagactgaaccaataaagagatgtcacgtcaccttcaaaaaaaaaaaaaaaaaaaaaaaaaaaaaaaaaaaaaaaaa

SEQ ID NO: 71 - DNA, 2121 bp, Homo sapiens
ggcacgaggatgcggctctctgaccctctctgtgccctcccccgccccccgaaccaggcttggcgggcggaggcgccagcggatgtctcatgcaaggatcgtctctgtggctaagcctcactttccgctccgcccgggtgctctctagagcccggtttttcgagtggcagtctccagggctgccgaatacagcagcgatggagaacggcaccgggccctacggagaagaacgtccacgtgaagtccaggagacgacagtcaccgagggggctgccaaaatcgcctttcccagtgccaacgaggtcttttataacccggtgcaggaattcaatcgggacctgacatgtgctgtgatcaccgagtttgctcgcattcagcttggggccaaaggaatccagatcaaggttccaggagagaaggacacgcaaaaagtggtcgtggacttgtcagagcaagaggaggaaaaggttgaactgaaagagagtgaaaacctggcctcaggagaccaacctcgcacagcggccgtgggggagatctgtgaggaaggcctgcatgtgctggaaggcctggcagcttcaggcctacgttccattcgatttgccctagaggtgcctgggctcagatctgtggttgcaaacgatgcctccacccgggctgtggatctcatacgccggaatgtccagctcaatgacgtggcccacctggtacagccgagccaagcagatgcccggatgctgatgtaccagcaccagagggtgtcggagaggtttgacgtcatcgatctggacccctatggcagcccagccaccttcctggatgcagctgtgcaggctgtgagtgaaggagggttgctgtgtgtgacctgcacagacatggcggtgttggcggggaacagcggggagacgtgctacagcaagtacggggccatggccctcaagagccgggcctgccacgagatggccctgagaatcgtcctgcacagcctggacctccgcgccaactgctaccagcgcttcgtggtgccgctgctcagcatcagcgctgacttctacgtgcgtgtttttgtccgtgtcttcaccggccaggccaaggtcaaggcctcagccagcaagcaggcgctggtgttccagtgtgtgggctgcggggccttccaccttcagcgtctcggcaaagcgtcaggagtccccagcggccgggccaagttctctgcagcctgtggtccccctgtgacccccgagtgtgaacactgtgggcaacgacaccagcttggtggccccatgtgggcagagcccatccatgacctggattttgtgggccgtgtcctggaggctgtgagcgctaaccccggccgcttccacacctcggagcggatccgaggggtcctgagcgtcatcactgaggagctcccggacgtgcctctgtactacaccctggaccagctgagcagcaccatccactgcaacacaccaagcctcctgcagttgcggtcggccctcctccacgctgacttccgggtctcactctcccacgcctgtaagaacgctgtgaagacggatgcccctgcctctgccctctgggacatcatgcgttgctgggagaaggaatgtccggtgaaacgggagcgactatcagagactagcccagcgttccgcattctcagtgtggagcccaggctgcaggccaacttcaccatccgggaagatgccaaccccagctcccgacagcgaggactcaagcgcttccaggctaacccggaggccaactggggtccccggcctcgtgcccggccagggggcaaggcggccgacgaagctatggaggagagacgcaggctgcttcagaacaagcggaaggagccgccggaagatgtggcccagcgggctgcccggctcaagacatttccttgcaagaggtttaaggagggcacctgtcaacgcggggaccagtgctgctactcccacagccccccgacacccagggtttctgctgatgctgcccctgactgtccagagacctccaaccagaccccccctggacctggggctgccgctgggccaggcatagactgaaccaataaagagatgtcacgtcaccttcaaaaaaaaaaaaaaaaaaaaaaaa

SEQ ID NO: 72 - DNA, 2853 bp, Homo sapiens
cgcaccacccccttggcgccgcgtctctcccgcgcccgcgcttccggccccggcgcgcccgcgcgaggactgtgggagcggcttccttggattccgcgcttggcaacggctcggcgtcgcgctttggccaaccgctgcgtcgtccctgggcccgaataactgtcgcccgcttccctcagcgcgaggtacaaatgatgcaaaatgtgcacctggctccagagacagatgaagatgatctttattccggctataatgactacaatccaatctatgatatcgaggaattggagaatgatgcagcttttcagcaagctgtgaggactagtcatggcagaagacctccaataactgctaaaatatcaagcacggcagttactagacctatagctactggatatgggtccaagacatctctggcatcatcaataggaagaccaatgacaggggctattcaggatggagttactagacccatgacagcagtgagagcagctggttttaccaaagcagctttgagaggctctgcatttgacccccttagtcagtcaaggggccctgcttcccctttggaagccaagaaaaaagatagcccagaggaaaaaataaagcaattagagaaggaagtaaatgagttggtagaagaaagctgtattgccaatagttgtggagacttaaaattggccttagaaaaggcaaaagatgcaggaagaaaagagagagtcctggtgagacagcgagaacaagttacaactccagaaaatatcaatttggatttaacttactcagttctttccaatttggccagtcagtattcagttaatgaaatgtatgccgaagcacttaacacttatcaagttatagtcaaaaataagatgtttagcaatgcaggaatattgaaaatgaatatgggaaatatctatttaaagcaaagaaattattccaaagccattaaattctaccgaatggcattagaccaagttccaagtgtcaataagcaaatgaggattaaaataatgcagaatattggagttacatttattcaggctggtcagtattcagatgctattaattcatatgagcacataatgagcatggcaccaaatctgaaggcaggctacaacctaactatctgttattttgctattggagaccgagaaaaaatgaagaaggcattccaaaaattgattactgttccattagaaattgatgaagataaatatatttcaccaagtgatgatcctcatactaacttagtaactgaagctataaaaaatgatcacctcaggcaaatggaacgtgaaaggaaagccatggcagaaaaatatattacgacatctgcaaaactcattgctcctgtaattgaaacatcttttgctgcaggttgtgattggtgcgtggaagtggtgaaagcttctcaatatgtagagctagccaatgatctggaaataaacaaagcagttacatacttgagacaaaaagactataaccaagctgtagagatcttaaaagtgttggaaaaaaaggacaatagagtgaaaagtgcagctgcaaccaatctctcagccctgtattatatgggaaaggattttgcacaagccagcagctatgcagatatagctgtgaactctgatagatataatccagcagctcttactaataaagggaatacagtttttgcaaatggtgattatgagaaggccgctgaattctataaagaggctctaagaaatgattcttcttgtactgaagcactttataatattggccttacctatgagaaactaaatcggctagatgaggctttggactgtttcctgaaacttcacgcaatcctacgaaacagtgccgaagttctttaccagatagcaaatatatatgaattaatggaaaatcccagtcaagctattgaatggctaatgcaggtggtcagtgttattccaaccgatcctcaagttttatctaagctaggagaattatatgatcgtgaaggagataaatctcaagcatttcaatattactatgagtcatataggtattttccttgtaatattgaagtcattgagtggcttggagcctattacattgacacccaattttgggaaaaagctattcagtactttgaaagagcttctcttatacagcctacacaagtgaaatggcagctgatggtagctagttgtttcagaagaagtggtaactaccaaaaagcattagatacttacaaagatactcacagaaaatttccagaaaatgtcgaatgtctgcgtttcttagttcgtctctgcacagatcttggattaaaagatgctcaagaatatgccagaaaactgaagaggttggaaaaaatgaaagaaataagggaacagcgcataaagtcaggcagagatggcagtgggggctcccgtggcaaaagagaaggaagtgctagcggtgatagtggccagaactatagtgccagtagtaaaggtgaacgactaagtgccagactcagagctttacctgggacaaatgaaccttatgaaagtagcagtaacaaagaaatagatgcctcctatgtggacccacttggccctcaaatagaacgaccaaaaactgcagccaagaaaaggatcgatgaggatgattttgctgatgaagaattaggagatgatttgcttccagaataatattcactttaatatttattaaaggaaagaaattgccttatgagatcatcctcatgttaaaccttggattaaatatctaacctgtaattattttttttcactgtcaaaacttaagtaagtgtattctattctgtatgtatgcatttaagttgtttttttcttttaaggaataaaaacaggtaaaact

SEQ ID NO: 73 - DNA, 2978 bp, Homo sapiens
ctcggaagccaaaaccgtgcttgaactcactgcccgcgcctcatctctcctcatgggcagtttcctgagcaaactggaactttcgccctcgtccccagcccaggtgcgcaccgacttgcccgagaggcccacgaaacgccggccacctcagccccttcaccaagttcatcgggttcagttcgtccaccgcgcccaccctgccccacggtatagacctgtgaggaggcggccaaacctggatcctgccaatccaaccacgtggctggccaacgaggcctggaggcgctttcccatgaagaagtcccagaattcccccctggggcctctcccttcagactggtgggaaagttacttaaagcggactatttggtctcttcgacatcccaggccaatttggagcccagtgaccatcaggatcactcctcctgaccagagagtgcccccttccacttctcctgaagatgtaattgcccttgcaggactcccgccctctgaggagctcgcagatccatgttcaaaggagacagtgttgagggccctcagagagtgcagaaaagggaaagggaggttggaagaaccactattccctgagagtctggacagtaagagaaggagtccagagaccagaccatcggcatttaagcccctgatgaaaaatggaaccctcacttcttttgtgcccaggcctgggccgctgaagagaagtctccactcctggggctcagatcacagcttgactaagaggcccaattgctcctccatgagctccttggccagcatatacagaggtggcaccctcagctccaaaaggaatgctattggcagctcttacagctcttgcagaaatttctcagacccttggaagagaagtgttcccagtgtatcattcgagacaccagagtggccaataaaaaaggaaaaaagttgtcatcggccttcctctccagtcccactggtatcagattttgagtccctaggaggatctgaaagttctgggcagcaaaaccagaagattccacagctgccgtctagccctgagaacctggtgtcagagatcccacctccccagcttggttatgcagtctctgatgagaacttgactttggggaagaaagctgagctacagtccacgggagaggcaaccagtgtggcccattctcctttgaagacacccagcctaccgaccccacctgggtgctcacagtcagagctccttccaggcacctctccagactcaaagcccacagctactttcatcctgctgacccccacctctcccacattaccagttactgacaccacctggccgccttcaacctctcaggctgacaggtctcccatgcccccagacccacctgcaccacccaccatccaaagtactttgcttggaatggtgagtagcccaacatcccatctttctgcatctgcacctcctgatgcaacttctgctcacctcatgttaaaaccgattttggggcccctgcacaacagcgagattggaagctcctcatattccagaatttcagtcacagctgcagcatcttcaatctcttccctttccacaattcagggtaccttaactcctaccttcaagcctatctttggcagcatagatccacttaaaactacgcccatgatagctcctttctcctccaagcagacccctcctccatttactcatgcttctacccatcatttccatggcctggtcaaggccacctctgtggtcatgtccaccaccctagccagcacatctaaagactctgtttttaagccacctttggattttggtgtagtgaatgtcaccagtgccgtaggcaacacttattctgtcccttccacttgcgacactttcctgcttgggactgctcaggccttcagggccgacttcaccccagccacaggattcattttcccaccacaccaccatcctacaattcctactgtgcatacagtcaccatgtttacccaggtcctttccagtgttgtacagatatcccctagaagcagcactgctaatttcaggggtatgggcagccctctgcctgcctctgccctagtatccacaaactggcttgcatcaacccccagcatctccaacctgactccagcaatcacaagtcccttgggatcaagctcaaggccacctttcccactatcccaaggagctaatccccagcctgcatttggtgccacaaatggacagaaacaagggccttcccagccagcccttatgccaagtgtcagtagttcttttctttttgggagctcagcagtggcattgccaacccccatgccaactccagctcagccagccttcattagtaccacacagtcagccttggggtgtttgacaccctcagcctccacctctcaaacccctgccagcacctggtcaggcattggcggcattccagcaggttttcccattagtcaagctagtacaactgggtttagaattgtaattcagacccaccaaagtggggcttttggctcagtgtttggcagcagagctccacaacctttcacttttgggggattcgtgacccctatggactgtgatgagtctgggatcataatgactggtccagacatgagccccacctctggagctttcagcattggagcattgcctagtgggaccactaacaccatgatcccctttggaaaaggctggagccagaacactgaaggcctgcccagccaccgcacagctttttccttggggagaggcagcatttctgcaagaaagactatggcccccattgctcaaaacaccccagtccctggacaagctaaggcaggcagcagtgttggctttgggatgccttttccacctgcccagggctctgttgggagaggaccttttagatcatcagcctcttcattttccattggcgcaaaatcaaaaaccccaaagaatcgggagaaagggcattcccgaaggcatcatgcctacaagaagtagcctgtgttcc

SEQ ID NO: 74 - DNA, 2085 bp, Homo sapiens
gtgcagctcttgggttttttgtggcttccttcgttattggagccaggcctacaccccagcaaccatgtccaagggacctgcagttggtattgatcttggcaccacctactcttgtgtgggtgttttccagcacggaaaagtcgagataattgccaatgatcagggaaaccgaaccactccaagctatgtcgcctttacggacactgaacggttgatcggtgatgccgcaaagaatcaagttgcaatgaaccccaccaacacagtttttgatgccaaacgtctgattggacgcagatttgatgatgctgttgtccagtctgatatgaaacattggccctttatggtggtgaatgatgctggcaggcccaaggtccaagtagaatacaagggagagaccaaaagcttctatccagaggaggtgtcttctatggttctgacaaagatgaaggaaattgcagaagcctaccttgggaagactgttaccaatgctgtggtcacagtgccagcttactttaatgactctcagcgtcaggctaccaaagatgctggaactattgctggtctcaatgtacttagaattattaatgagccaactgctgctgctattgcttacggcttagacaaaaaggttggagcagaaagaaacgtgctcatctttgacctgggaggtggcacttttgatgtgtcaatcctcactattgaggatggaatctttgaggtcaagtctacagctggagacacccacttgggtggagaagattttgacaaccgaatggtcaaccattttattgctgagtttaagcgcaagcataagaaggacatcagtgagaacaagagagctgtaagacgcctccgtactgcttgtgaacgtgctaagcgtaccctctcttccagcacccaggccagtattgagatcgattctctctatgaaggaatcgacttctatacctccattacccgtgcccgatttgaagaactgaatgctgacctgttccgtggcaccctggacccagtagagaaagcccttcgagatgccaaactagacaagtcacagattcatgatattgtcctggttggtggttctactcgtatccccaagattcagaagcttctccaagacttcttcaatggaaaagaactgaataagagcatcaaccctgatgaagctgttgcttatggtgcagctgtccaggcagccatcttgtctggagacaagtctgagaatgttcaagatttgctgctcttggatgtcactcctctttcccttggtattgaaactgctggtggagtcatgactgtcctcatcaagcgtaataccaccattcctaccaagcagacacagaccttcactacctattctgacaaccagcctggtgtgcttattcaggtttatgaaggcgagcgtgccatgacaaaggataacaacctgcttggcaagtttgaactcacaggcatacctcctgcaccccgaggtgttcctcagattgaagtcacttttgacattgatgccaatggtatactcaatgtctctgctgtggacaagagtacgggaaaagagaacaagattactatcactaatgacaagggccgtttgagcaaggaagacattgaacgtatggtccaggaagctgagaagtacaaagctgaagatgagaagcagagggacaaggtgtcatccaagaattcacttgagtcctatgccttcaacatgaaagcaactgttgaagatgagaaacttcaaggcaagattaacgatgaggacaaacagaagattctggacaagtgtaatgaaattatcaactggcttgataagaatcagactgctgagaaggaagaatttgaacatcaacagaaagagctggagaaagtttgcaaccccatcatcaccaagctgtaccagagtgcaggaggcatgccaggaggaatgcctgggggatttcctggtggtggagctcctccctctggtggtgcttcctcagggcccaccattgaagaggttgattaagccaaccaagtgtagatgtagcattgttccacacatttaaaacatttgaaggacctaaattcgtagcaaattctgtggca

SEQ ID NO: 75 - DNA, 3172 bp, Homo sapiens
gctgggtttagtaggagacctggggcaaggccccctgtggacgaccatctgccagcttctctcgttccgtcgattgggaggagcggtggcgacctcggccttcagtgtttccgacggagtgaatggcggcggcggctgggatgctgctgctgggcttgctgcaggcgggtgggtcggtgctgggccaggcgatggagaaggtgacaggcggcaacctcttgtccatgctgctgatcgcctgcgccttcaccctcagcctggtctacctgatccgtctggccgccggccacctggtccagctgcccgcaggggtgaaaagtcctccatacattttctccccaattccattccttgggcatgccatagcatttgggaaaagtccaattgaatttctagaaaatgcatatgagaagtatggacctgtatttagttttaccatggtaggcaagacatttacttaccttctggggagtgatgctgctgcactgctttttaatagtaaaaatgaagacctgaatgcagaagatgtctacagtcgcctgacaacacctgtgtttgggaagggagttgcatacgatgtgcctaatccagttttcttggagcagaagaaaatgttaaaaagtggccttaacatagcccactttaaacagcatgtttctataattgaaaaagaaacaaaggaatactttgagagttggggagaaagtggagaaaaaaatgtgtttgaagctctttctgagctcataattttaacagctagccattgtttgcatggaaaggaaatcagaagtcaactcaatgaaaaggtagcacagctgtatgcagatttggatggaggtttcagccatgcagcctggctcttaccaggttggctgcctttgcctagtttcagacgcagggacagagctcatcgggaaatcaaggatattttctataaggcaatccagaaacgcagacagtctcaagaaaaaattgatgacattctccaaactttactagatgctacatacaaggatgggcgtcctttgactgatgatgaagtagcagggatgcttattggattactcttggcagggcagcatacatcctcaactactagtgcttggatgggcttctttttggccagagacaaaacacttcaaaaaaaatgttatttagaacagaaaacagtctgtggagagaatctgcctcctttaacttatgaccagctcaaggatctaaatttacttgatcgctgtataaaagaaacattaagacttagacctcctataatgatcatgatgagaatggccagaactcctcagactgtggcagggtataccattcctccaggacatcaggtgtgtgtttctcccactgtcaatcaaagacttaaagactcatgggtagaacgcctggactttaatcctgatcgctacttacaggataacccagcatcaggggaaaagtttgcctatgtgccatttggagctgggcgtcatcgttgtattggggaaaattttgcctatgttcaaattaagacaatttggtccactatgcttcgtttatatgaatttgatctcattgatggatactttcccactgtgaattatacaactatgattcacacccctgagaacccagttatccgttacaaacgaagatcaaaatgaaaaaggttgcaaggaacgaatatatgtgattatcactgtaagccacaaaggcattcgaagagaatgaagtgtacaaaacaactcttgtagtttactgtttttttaagtgtgtaattctaaaagccagtttatgatttaggattttgttaactgaatggttctatcaaatataatagcatttgacacattttctaatagttatgatacttatacatgtgctttcaggaagttccttggtgaaacaattgttgaggggggatctaggtaattggcagattctaaataatataatttccagatagtaattttaagagtactcatcgctcttgccaaataagttcagggtattcaaatcttggactagtcctgcaaggtataaagaataaaaatcccagtgagatacttggaaaccacagtttattattatttatctgggcaattattgtgtgtgtgaggatggaagggtagggaataatcgaacatctaaagccttgaataagagaatactaattgttttggtatgatgatactcagaaatggagatattataggaaaaagaaatcctttggaattttaactaaaatcactgcatatgggaaattaagagatccaggaccatatttgataagagttcctaaaaataatgtaattattaatgctaaagactgctcatgtatcttgatctaattactaaataaattacatatttatttacctgataaatatgtatctagttctacaaggtcacatttatgtggaagtccaaagtcaagtccttaggggataattttgttttgggctcagttgttccctgcttccttttttttttttttttttttttgagatggagtctcgctctgttgcccaggctggagtgcagtggtgcgatctcagctcactgcatcctctgcctcccgggttcaagcaattctctgcctcagcctcccaagtagttgggattacaggcacctgccaccatgcctggctaattttttgtatttttagtagagacgggggtttcactatgttggctaggctggtcttgaactcctgagcctcgtgagtccacccgccttggcctcccaaagtgctgggattacaggcatgagccaccgcacctggccttccctgcttcctctctagaatccaattagggatgtttgttactactcatattgattaaaacagttaacaaacttttttctttttaaaatgtgagatcagtgaactctggttttaagataatctgaaacaaggtccttgggagtaataaaattggtcacattctgtaaagcacattctgtttaggaatcaacttatctcaaattgtaactcggggcctaactatatgagatggctgaaaaaataccacatcgtctgttttcactaggtgatgccaaaatattttgctttatgtatattacagttctttttaaaacactggaagactcatgttaaactctaattgtgaaggcagaatctctgctaatttttcagattaaaattctctttgaaaaaat

SEQ ID NO: 76 - DNA, 522 bp, Homo sapiens
  misc_feature (22)..(26): n is a, c, g, or t
  misc_feature (45)..(45): n is a, c, g, or t
cctcgagttttttttttttttnnnnnttttttttttttttttttntttttttttttttttttttgggcaaaatacaatttcatttaacaaattgaatttgctgcgcctgctaatcacgtctggtgtcggctctgatcagagacagaaagaggaggctgcagccccgggggtccttgtggtagcggtggtgggagcggagcggtgtacacattgagggagacaaatcactgtttggcccaggggaaccccacccacagtaatggaaactcagggcaggttagcattttattagataaaaacaggaaggagggtgcctacccacccctgcctgctactggctctgaagggcactcctcaacttccccaagaaagaggacgcgtctctgacactgtgatcatgacaggggttcaaacagaaagtgcctgggccctccttctaagtcttgttaccaaaaaaaggaaaaagaaaagatcttctcagttacaaattctgggaagggagactatacctggctcttgccc

SEQ ID NO: 77 - DNA, 522 bp, Homo sapiens; identical to SEQ ID NO: 76
  misc_feature (22)..(26): n is a, c, g, or t
  misc_feature (45)..(45): n is a, c, g, or t

SEQ ID NO: 78 - DNA, 3516 bp, Homo sapiens
  misc_feature (1047)..(1047): n is a, c, g, or t
  misc_feature (1086)..(1086): n is a, c, g, or t
  misc_feature (1120)..(1120): n is a, c, g, or t
  misc_feature (1155)..(1155): n is a, c, g, or t
  misc_feature (1220)..(1220): n is a, c, g, or t
  misc_feature (1226)..(1226): n is a, c, g, or t
  misc_feature (1441)..(1441): n is a, c, g, or t
  misc_feature (1453)..(1453): n is a, c, g, or t
  misc_feature (2437)..(2457): n is a, c, g, or t
  misc_feature (2922)..(2922): n is a, c, g, or t
  misc_feature (3257)..(3257): n is a, c, g, or t
  misc_feature (3303)..(3303): n is a, c, g, or t
  misc_feature (3306)..(3306): n is a, c, g, or t
  misc_feature (3336)..(3336): n is a, c, g, or t
  misc_feature (3344)..(3344): n is a, c, g, or t
cacgcgtccctcttgcaacttgctgagtttccctaagatcattattttgaattccttttctggcatttttatagatttccttttcttttgaatctgttactggagaattattgtgtctctttggaggtatcaaatttccttgctttttcatgtttcttgtgtccttacattgatatctattcagctagtggaagagttgcttcttccaattttatggattggctttcataaggaaagacttttttgtaggcatatctgtagttttggttgtgattaggatgttttggctttgattctggtgagcacaggagtgtaggctcaatgatttcttcagctgtaaccaatgtaactggtgtcatgtaaccatgtcactgtgagtcctcagtggcttaagttgccattgttagctgaggctgttgtgaggcttttctggggaaagggatgccagaggggccagtccctgggccttttggtggcatgggcaggctttagctgtggtggcgatgggctgggcatgctagtcctcaggaccccagctggtgtaagtgctggtagtggggggcccaggtgggctggtcctcaagcccccaggcagcatttatggtgctggcagtggcagtagcagcagtgggctagacactggactgtcaggtggcaatcatagctgttggcagtagctgtggcaggatgaatgggacagtttctagccccctaggtgatgcacttgggtgggcactggtggtaggtggggcaggcctgttcaggccttgggattgtgtgcgtgggcaccagtggtgttggatggggtgggccagtcgtcaggcccccctacagagcatataggcaccagtagtggcatgagggaaagatagcgctggagaacactggtgacagtgggtggagcaggcctgtctttaggttcttggatggcacatatggacatactggtcctcaggccccctgaaggtgcacacaggcatgctgttgccctgctgagaggggcaaggttctgttggtggcattggtgttgggaagatggctcccagnttctgggagcttcagctccctttttcctggggtagcctncctggtgtgctatactgcctgttccctgggatanaagacacttcatgggtcagagtactggggacctgnctgcactgctgggtgattgtgatactgcaaccttctggatggatgtgggaggatgttcttggggntccagngatgtggactgcaggggcttattggaccccaagtgggcaggatataatctggtgggggctagcctcttaaaatggtgctgtgccacagcagcatgtttcttgggatgtgagtaggatccagtggaattccctttctggaagaacgcatttgcatggattccaggcagctccgtatactggactcagggcctgtgaaggctgacggcatcccctgntgggtgccagcnatctgtgctgcgaatgtggaccactgcagttctttgacttttcttttcccagaaatgggattcccctcctgcttctgagccagtccaagacatgctggctgctttatttactgctccctttgtgcctcagaagttccctgttgaatagtgttctgtctttggtgctctacctgacatgtggttaactacttgcttttttggtcctttgttgtgcaggagttgagtgccaggctcacggttttttgattaccatagttttgtagtttttgaaattcagaagtgtgagacctccaactttttctttttcaagattattttggctgttgagtcaattatgattccatatgcattttagatggatttttctatttctggaattgtgccattaggagtctgatagatactgcattgaatctgtagagtgctttgggtagtattgacatcttcccactattaagtcttccagtacatgaacacatgcattttcctgatgactaatgatgttgtaccttttcatatgcttattggctatttgtagatcttcctgggagaaatgtctatgcagactttttgccaattttttaatttgtccatttaaaaatcagggttttttttgttgttgagttgtaggagttctttttgtattccttatactagtcccttatcagatatatgctttgcagatattttctcccaggtgggttgtcttcacttccttggtagtgtcttttaatacacaaagttttaaatttttatgaagtcaaatgtatctacatttttctttggttgctcatgcttttggtgttgcatctaagaatccactgccaaatccaaggtcatgaagatttactcctatgttttcttctaagaattttatagtttttgctattacataaggtctttgagccattaagatctttgacttaacttttgtatatgatgtaaagtcactgtcaaacatcattcttttgcatttggctgtcnnnnnnnnnnnnnnnnnnnnnactgggttactgaggactgggtagcttagttgagtagataatcttttgttgtttcctccttgtaatatacaagccttggcttctgtgacatcatactctcctagatttccccctgtcactgtggcttcttctcagtctctgtccatccctggtgctcctgaaggttctgttctcagccttacacacattacctgggtgatctcattctctgccatgacttcacttgccatatatgtgctgattttccccaaattcctatttctcccgacctttacatctattttatttgcaggtcatatatctaataaggaattgatatccagtgtacatgtagaactcctgtaattcaatacagaaaccaaacagtccaattaataaatggagaagagatttgaatgaacatttttctaaagaacatctcaagctcaagatttcccagataacttttctttcttcaaaatctgnttctgtgtttcctcatctgtaggtggcacagcatacatctgatttcccaagccagaaacctcatagttattcttgactccaggaagaaatattattgagtttttaaaaactcagcttattgactcattgttttatataataaaatgcaacagttttaagtgtatatttcaatgagttttaatacatttatgtacttgtgtcactatcctcatagatagagacaaaacatttctatcacaccggcaatttcctatgtgtcccatcccaatcaatcctttcccctttgctggctccaaacaatgactctttcctatctttttagaaagattagaatngcttttctagagttccagtaatggaatcatacagtgtctaagtctnttngtggtgctgtaacaaaatacctgagactgngtaatttnataaattataggaatttatttctcacagttctggatgctgaaaagtttatgatcaaggcactagcaggtttggtgtctgagggcccagtttctaatttgaagatggtgctttaaacactgtcctcacatggtagaaggggcagatgggcaaacaaaaaaaaaaaaaaaaagg

SEQ ID NO: 79 - DNA, 3044 bp, Homo sapiens
cctccaggtcctggcgcacagggtgggagcgctgcgctgcgccgcgctgcgcatcgcggcccgcttgccgcctgccccctgccctagctgggccacctccccgggctgccggtggagggctaagaggcgctaacgttacgctgtttccggttttccagcgggctctgtttcccctcccaaggcggcggcggctgagcggcggagccccccaaatggcctggccagatgcggcaggtttgctgctcagcgctgccgccgccgccactggagaagggtcggtgcagcagctacagcgacagcagcagcagcagcagcgagaggagcagcagcagcagcagcagcagcagcgagagcggcagcagcagcaggagcagcagcaacaacagcagcatctctcgtcccgctgcgcccccagagccgcggccgcagcaacagccgcagccccgcagccccgcagcccggagagccgccgcccgttcgcgagccgcagccgccggcggcatgaggcgcgacccggcccccggcttctccatgctgctcttcggtgtgtcgctcgcctgctactcgcccagcctcaagtcagtgcaggaccaggcgtacaaggcacccgtggtggtggagggcaaggtacaggggctggtcccagccggcggctccagctccaacagcacccgagagccgcccgcctcgggtcgggtggcgttggtaaaggtgctggacaagtggccgctccggagcggggggctgcagcgcgagcaggtgatcagcgtgggctcctgtgtgccgctcgaaaggaaccagcgctacatctttttcctggagcccacggaacagcccttagtctttaagacggcctttgcccccctcgataccaacggcaaaaatctcaagaaagaggtgggcaagatcctgtgcactgactgcgccacccggcccaagttgaagaagatgaagagccagacgggacaggtgggtgagaagcaatcgctgaagtgtgaggcagcagccggtaatccccagccttcctaccgttggttcaaggatggcaaggagctcaaccgcagccgagacattcgcatcaaatatggcaacggcagaaagaactcacgactacagttcaacaaggtgaaggtggaggacgctggggagtatgtctgcgaggccgagaacatcctggggaaggacaccgtccggggccggctttacgtcaacagcgtgagcaccaccctgtcatcctggtcggggcacgcccggaagtgcaacgagacagccaagtcctattgcgtcaatggaggcgtctgctactacatcgagggcatcaaccagctctcctgcaaatgtccaaatggattcttcggacagagatgtttggagaaactgcctttgcgattgtacatgccagatcctaagcaaaagcaccttggatttgaattaaaggaagccgaggagctgtaccagaagagggtcctgaccatcacgggcatctgcgtggctctgctggtcgtgggcatcgtctgtgtggtggcctactgcaagaccaaaaaacagcggaagcagatgcacaaccacctccggcagaacatgtgcccggcccatcagaaccggagcttggccaatgggcccagccacccccggctggacccagaggagatccagatggcagattatatttccaagaacgtgccagccacagaccatgtcatcaggagagaaactgagaccaccttctctgggagccactcctgttctccttctcaccactgctccacagccacacccacctccagccacagacacgagagccacacgtggagcctggaacgttctgagagcctgacttctgactcccagtcggggatcatgctatcatcagtgggtaccagcaaatgcaacagcccagcatgtgtggaggcccgggcaaggcgggcagcagcctacaacctggaggagcggcgcagggccaccgcgccaccctatcacgattccgtggactcccttcgcgactccccacacagcgagaggtacgtgtcggccctgaccacgcccgcgcgcctctcgcccgtggacttccactactcgctggccacgcaggtgccaactttcgagatcacgtcccccaactcggcgcacgccgtgtcgctgccgccggcggcgcccatcagttaccgcctggccgagcagcagccgttactgcggcacccggcgccccccggcccgggacccggacccgggcccgggcccgggcccggcgcagacatgcagcgcagctatgacagctactattaccccgcggcggggcccggaccgcggcgcgggacctgcgcgctcggcggcagcctgggcagcctgcctgccagccccttccgcatccccgaggacgacgagtacgagaccacgcaggagtgcgcgcccccgccgccgccgcggccgcgcgcgcgcggtgcgtcccgcaggacgtcggcggggccccggcgctggcgccgctcgcgcctcaacgggctggcggcgcagcgcgcacgggcggcgagggactcgctgtcgctgagcagcggctcgggcggcggctcagcctcggcgtcggacgacgacgcggacgacgcggacggggcgctggcggccgagagcacacctttcctgggcctgcgtggggcgcacgacgcgctgcgctcggactcgccgccactgtgcccggcggccgacagcaggacttactactcactggacagccacagcacgcgggccagcagcagacacagccgcgggccgcccccgcgggccaagcaggactcggcgccactctagggccccgccgcgcgcccctccgccccgcccgccccactatctttaaggagaccagagaccgcctactggagagaaaggaggaaaaaagaaataaaaatatttttattttctataaaaggaaaaaagtataacaaaatgttttattttcattttagcaaaaattgtcttataatactagctaacggcaaaggcgtttttatagggaaactatttatatgtaacatcctgatttacagcttcgg

SEQ ID NO: 80 - DNA, 2305 bp, Homo sapiens
ttcttggggctgatgtccgcaaatatgcagaattaccggccgggtcgctcctgaagccagcgcggggagcgagcgcggcggcggccagcaccgggaacgcaccgaggaagaagcccagcccccgccctccgccccttccgtccccaccccctacccggcggcccaggaggctccccggctgcggcgcgcactccctgtttctcctcctcctggctggcgctgcctgcctctccgcactcactgctcgccgggcgccgtccgccagctccgtgctccccgcgccaccctcctccgggccgcgctccctaagggatggtactgaatttcgccgccacaggagaccggctggagcgcccgccccgcgcctcgcctctcctccgagcagccagcgcctcgggacgcgatgaggaccttggcttgcctgctgctcctcggctgcggatacctcgcccatgttctggccgaggaagccgagatcccccgcgaggtgatcgagaggctggcccgcagtcagatccacagcatccgggacctccagcgactcctggagatagactccgtagggagtgaggattctttggacaccagcctgagagctcacggggtccacgccactaagcatgtgcccgagaagcggcccctgcccattcggaggaagagaagcatcgaggaagctgtccccgctgtctgcaagaccaggacggtcatttacgagattcctcggagtcaggtcgaccccacgtccgccaacttcctgatctggcccccgtgcgtggaggtgaaacgctgcaccggctgctgcaacacgagcagtgtcaagtgccagccctcccgcgtccaccaccgcagcgtcaaggtggccaaggtggaatacgtcaggaagaagccaaaattaaaagaagtccaggtgaggttagaggagcatttggagtgcgcctgcgcgaccacaagcctgaatccggattatcgggaagaggacacggatgtgaggtgaggatgagccgcagccctttcctgggacatggatgtacatggcgtgttacattcctgaacctactatgtacggtgctttattgccagtgtgcggtctttgttctcctccgtgaaaaactgtgtccgagaacactcgggagaacaaagagacagtgcacatttgtttaatgtgacatcaaagcaagtattgtagcactcggtgaagcagtaagaagcttccttgtcaaaaagagagagagagagagagagagagaaaacaaaaccacaaatgacaaaaacaaaacggactcacaaaaatatctaaactcgatgagatggagggtcgccccgtgggatggaagtgcagaggtctcagcagactggatttctgtccgggtggtcacaggtgcttttttgccgaggatgcagagcctgctttgggaacgactccagaggggtgctggtgggctctgcagggcccgcaggaagcaggaatgtcttggaaaccgccacgcgaactttagaaaccacacctcctcgctgtagtatttaagcccatacagaaaccttcctgagagccttaagtggtttttttttttgtttttgttttgttttttttttttttgttttttttttttttttttttttttacaccataaagtgattattaagcttccttttactctttggctagctttttttttttttttttttttttttttttttaattatctcttggatgacatttacaccgataacacacaggctgctgtaactgtcaggacagtgcgacggtatttttcctagcaagatgcaaactaatgagatgtattaaaataaacatggtatacctacctatgcatcatttcctaaatgtttctggctttgtgtttctcccttaccctgctttatttgttaatttaagccattttgaaagaactatgcgtcaaccaatcgtacgccgtccctgcggcacctgccccagagcccgtttgtggctgagtgacaacttgttccccgcagtgcacacctagaatgctgtgttcccacgcggcacgtgagatgcattgccgcttctgtctgtgttgttggtgtgccctggtgccgtggtggcggtcactccctctgctgccagtgtttggacagaacccaaattctttatttttggtaagatattgtgctttacctgtattaacagaaatgtgtgtgtgtggtttgtttttttgtaaaggtgaagtttgtatgtttacctaatattacctgttttgtatacctgagagcctgctatgttcttcttttgttgatccaaaattaaaaaaaaaataccaccaac

SEQ ID NO: 81 - DNA, 2667 bp, Homo sapiens
gagggtgggtcgaccccgggaattcggcacgagcggcggcggggccacccgcgagtccagcgtcgccgcagccccccaatgcggccgcgagaagcagcgggggggcaggcgatcgaaggagccttcacgtaaatgggtccagtcatgcctcccagtaagaagccagaaagctcaggaattagtgtctccagtggactgagtcagtgttacgggggcagcggtttctccaaggcccttcaggaagacgatgacctcgacttttctctgcctgacatccgattagaagagggggccatggaagatgaagagctgaccaacctgaactggctgcacgagagcaagaacttgctgaagagctttggggagtcggtcctcaggagtgtcagccccgtccaggacctggacgatgacacccccccatcccctgcccactctgacatgccctacgatgccaggcagaaccccaactgcaaacccccctactccttcagctgcctcatatttatggccatcgaggactctccaaccaagcgcctgccagtgaaggatatctacaactggatcttggaacattttccgtattttgcaaatgcacctactgggtggaaaaactcagtgagacacaatttatcattgaataagtgttttaagaaagtggacaaagagaggagtcagagtattgggaaagggtcgttgtggtgcatagacccagagtatagacaaaatctaattcaggctttgaaaaagacaccttatcacccacacccacacgtgttcaatacacctcccacctgtcctcaggcatatcaaagcacatcaggtccacccatctggccgggcagtaccttcttcaagagaaatggagcccttctccaagatcctgacattgatgctgccagtgccatgatgcttttgaatactccccctgagatacaagcaggttttcctccaggagtgatccaaaatggagcgcgggtcctgagccgagggctgtttcctggcgtgcggccgctgccaatcactcccattggggtgacagcggccatgaggaatggcatcaccagctgccggatgcggactgagagtgagccatcttgtggctccccagtggtcagcggagaccccaaggaggatcacaactacagcagtgccaagtcctccaacgcccggagcacctcgcccaccagcgactccatctcctcctcctcctcctcagccgacgaccactatgagtttgccaccaaggggagccaggagggcagcgagggcagcgaggggagcttccggagccacgagagccccagcgacacggaagaggacgacaggaagcacagccagaaggagcccaaggattctctgggggacagcgggtacgcatcccagcacaagaagcgccagcacttcgccaaggccaggaaggtccccagcgacacactgcccctcaaaaagagacgcaccgaaaagccccccgagagcgatgatgaggagatgaaagaagcggcagggtccctcctgcacttagcagggatccggtcctgtttgaataacatcaccaatcggacggcaaaggggcagaaagagcaaaaggaaaccacaaaaaattaaaaacaagtcactgatttgttttgaacttacgaccatttggtttcagcatgtcaggagatttctaatgatttgtggcaatatcagcaattttttttcttttttcttgtttggggtttggttttctttcttttcttttccttttattgggttttaatttgccccctcttctttgttttggacccttaagaattttatttttaaaggagattgaagccatagaactcatattgacactcagctgttttacaaaagcttttcattatctgaagacaaaaccgaaaaagccaaaattaccattgcttcctccagcttgtcagaaacctgtggctgaatccgcagggatgtcaacgtcaatatcacaggaacacacattcggcacctagaaggcacgtgggcaaagtaatcatcgttcaggcccaacccttaggtttaaaaagtcaggttgtccatcccattggggttcactgagtgaaggcacataaagcaattgaggaggaggaggaacccctcgtccccctaggagcagacccaagcttgtggcaccaggcatctgatggtgccaggaaagccactggaattgtcacacggcgagcacagagggccggccaccagtcctcgatgcttctgaaccctgaaccccgatgacatcttacgaggtggacgttggactgttcatgcgcatcgggtgtcagtgactcatggagaagaaatggggtaaatttttagtgatgttgctaatcattgaattctgttctctattaaattaagaaaatgttccaaaagccataagcctgaagattggccctgtgcacgcacgcacacacacacacacacacacacacacacacacacacacacgaaggagagagagagaaaactgatggggaaaacaagctgtgtcttcttaactgcccaagtgaaaagcaaccaagtccaggaaattacaatagctgttaaggaaaggaaataatggtacagatctttttctgtctatcaaaactatttgatccaagtgaaaaaaaaaaaaaaactagaaagctacggaacctgcaatgcggccgc

SEQ ID NO: 82 - DNA, 2590 bp, Homo sapiens
  misc_feature (98)..(100): n is a, c, g, or t
  misc_feature (102)..(102): n is a, c, g, or t
  misc_feature (104)..(108): n is a, c, g, or t
  misc_feature (111)..(111): n is a, c, g, or t
  misc_feature (773)..(775): n is a, c, g, or t
  misc_feature (777)..(777): n is a, c, g, or t
  misc_feature (779)..(786): n is a, c, g, or t
  misc_feature (1513)..(1513): n is a, c, g, or t
  misc_feature (1574)..(1575): n is a, c, g, or t
  misc_feature (1577)..(1577): n is a, c, g, or t
  misc_feature (2217)..(2217): n is a, c, g, or t
  misc_feature (2223)..(2225): n is a, c, g, or t
  misc_feature (2227)..(2228): n is a, c, g, or t
  misc_feature (2230)..(2231): n is a, c, g, or t
  misc_feature (2234)..(2234): n is a, c, g, or t
  misc_feature (2236)..(2238): n is a, c, g, or t
  misc_feature (2266)..(2266): n is a, c, g, or t
cttggagcggaataacaatttcacacaggaaacagttattacatgattacgaatttaatacgccttcactatagggaatttggccctcgagcccaagnnntngnnnnnagnggacaacatggcggccttcatgctgggctcgctgctgcggacgttcaagcagatggttccttcatcagcttcaggccaagttcgaagtcactatgtagactggagaatgtggcgcgatgtgaagagacgaaaaatggcctatgaatacgcagatgagaggctacgtattaattcactcaggaagaataccattttgccaaaaattcttcaggatgtggctgatgaagaaattgctgccctcccccgggatagctgtcctgttagaatcagaaatcggtgtgttatgacgtcccgtccgcgtggtgtgaagcggcgctggaggcttagtcgtatagtcttccgtcacttagctgaccatgggcaactttctgggatccagcgagcgacatggtaaatgagctccagaacctattgagcttgcagggaagccaagcttgcagttccagcaagcaaagattttttttaatagaccaaaccctaatctctacaggggcccagtacagttgtttggcctacctgatgctatctctaaactacttttaaaatgaagacatttgggtgtttcatgtcagtgaattatcttttctcttggacttaacaaacatactgttcccatacatagtacaaagagtagcataataaatattttctgtgaatgtttnnnanannnnnnnnttaagtttaatcttttagtaacatataggggtttttgtattaagagcattatttcataaaatgctatcttatacataatccaactaattgacatgtagctcatgtatggcagtttgtaatcctggactagctttgctgacctgcagagctccccttaactattattgttagataaacagattggatagcaaggctgctgttctggattatctaatgctccacttcttcttgtgatggctgaacaaaagaaccactaagtgttttcttgtccatccttaagggactttaaaacaaattatgcctctttaagtccttgaaagtctccatctaaagaggaaaagtttgttggaacagtatatattccctatttttatgtttatttaatccataacagaaatgagtaagggtagcacaaagttctcattcagtaactcaacagtgtgatcatcagcccagtgataaaaatatacatactgaatggaagtacctacttaacatcaggaaaatattcctggagaacttaataaatcaggaggtgaggggtgagatttttttctgcacacagagggaacaaaagcacaaagaagcaaaggcactctgtagcatcagagaaccacagtcacttcagtagatcagaaatatgaagcacaagacaaggcccgtattgtggaggatctcacaaatcatgtgaaggaattaagactgacataccaggtattacagagtnttaagcacaggaatgacatcatcagtttgtaatacaggtaagtgacagctgtgtggcaganngncatgagaggaaaaagctacaggcaagacaaccagttaggaggatgtcttagttgttgaggaagatgaaggcctgaactaacattgtggtattagtagaggagagaggacagatttttaaagttttaggaaagaaaattgggcaagacttacaagactgattatatctaagaggtaaagatggttctctgggttcctgataaaagtgtctagatagatggtagagggcaattccaagagggcaactccaagatagaaaatttggaaaaagaacaaatttaggggaaacagaagataagcgagttcaggttccagtcatgcggtgttggagatgcctgtgtcatctgatgaagactagtacgcagctggatagcagagtccgaaactcaggtggaggtgaagttatgagggaattatcacaatctagtttggattcatatttcttaaatatgtatgacaacttaccaactggaatgttctagctaatatctcaacttagaatccatctcactaccaatgggcaaacacttgtgttctaaagttacttgcaagtagtttatactgccaacttgatatatatacatgctatagtttgaacattttgtgtacttccaaaattcacattaaaatctaatccacaanaaaaannnannannaanannnggggcccttaggggtgattaggccaggngggctccacactcatggatgggatcagtgcctttctaagagggcttgagggagagagtttgtcccttttacccttctgatactgcgagaaggcaccgtactggaagcagaaagcaagcccttaccaaacaccaatctgctggtgccaaatcttagacttctccagcctccagaagtgcaagaagtaaatattatttataaattcttagtctatggcattttgttacagcagcaggaatagactaagacaatgtgttgataggtttaaggtcatgttttacttttttagtcattgtaaatttaaaatggttctaaaggcaaaact

SEQ ID NO: 83 - DNA, 1515 bp, Homo sapiens
tggggcgatcactttcttttcttctttagagtctaccggtgccaaaaggaagggtaaaaaagaacacactagtcaggctcaaggcatgaatggctcccttggctgtaacagctgccttaaggtttaaaacgtgcacatttggaaaagtggaaatgggtttagactccttccgtcatggaggagggtactatttcccatcaaaggtactcctaagaaatgtgtagttgtgagttcatactagacacaaggcaataaacaagttagcgaggtcacagtttaggggcttcacctttataacaccaagaggagcaatattttaaatacggttagcaagtatcaaataatttggttattttcccagcagcaacaaaaaaagaccaagtttaacagtattcaaagttggctgtcctggaggttgaattccctaaagaaagctgtgagaggacagagatgggtgaggaacgagtggcctctgcaacctgagatggccacattgcaaactctttcttgctgcggaacttcttctatttgctaaggaactgccattacactggtgtttacacagcaattccgaaaggaaatggcatcaaggcaaaatcttgatgccatggaaggcccttggaatgatccaattcagtggttttacaaacccaccacaaatgcggtgcctcggcagacatttgaaacctctcatctaacccgacttaagtgttccttgccttcctcagggattcctctaatttgtgaagtcactttgaaagaatgcgtgcgtgtggcaggagggagcgtgtggtgacttggtcactgccactctggttccaagttctgttttcaggagggggacaggtcagattttcctccagacataggtcacttccccagggtcggagatgaacttaaaggctaagaaacccagatttaaggtcaaaaccaggagctggaagaggaggaaaagagagtggaaggggttaagaagcagctgggcaagagcagaagatgctccagcagggacagaagcacgacctggccctcctttccatttagagcacattccatctggagaggtcaaccgaaatattaatcatgtggacaggagaaaaggatgtgaaaaaaccatttctcttatctcactttgaaatgtgaaagtgcatgttgtacaattgtcctcatggcttgtaacacatcatttaatgaattgatcacagtggaatgtaaagatgaagcagcatttattttgtatgttatattgcatataatttttagagttgacatttataaccatggaagctgttattttacatatcatcttcaaaccatatcagccttaaacacatttaaatttaataagcaagtagattagatttgcttttaagctaggcatatcattacagtgcgtgtttccgtcagaagggcatgctcacgattaaatactgtcttcagttgttttaaagaaacaaaaattttaaagaagggggttagagccaaagctgaaataattgagtatgaagccctaag

SEQ ID NO: 84 - DNA, 2797 bp, Homo sapiens
ttccccagcattcgagaaactcctctctactttagcacggtctccagactcagccgagagacagcaaactgcagcgcggtgagagagcgagagagagggagagagagactctccagcctgggaactataactcctctgcgagaggcggagaactccttccccaaatcttttggggacttttctctctttacccacctccgcccctgcgaggagttgaggggccagttcggccgccgcgcgcgtcttcccgttcggcgtgtgcttggcccggggaaccgggagggcccggcgatcgcgcggcggccgccgcgagggtgtgagcgcgcgtgggcgcccgccgagccgaggccatggtgcagcaaaccaacaatgccgagaacacggaagcgctgctggccggcgagagctcggactcgggcgccggcctcgagctgggaatcgcctcctcccccacgcccggctccaccgcctccacgggcggcaaggccgacgacccgagctggtgcaagaccccgagtgggcacatcaagcgacccatgaacgccttcatggtgtggtcgcagatcgagcggcgcaagatcatggagcagtcgcccgacatgcacaacgccgagatctccaagcggctgggcaaacgctggaagctgctcaaagacagcgacaagatccctttcattcgagaggcggagcggctgcgcctcaagcacatggctgactaccccgactacaagtaccggcccaggaagaaggtgaagtccggcaacgccaactccagctcctcggccgccgcctcctccaagccgggggagaagggagacaaggtcggtggcagtggcgggggcggccatgggggcggcggcggcggcgggagcagcaacgcggggggaggaggcggcggtgcgagtggcggcggcgccaactccaaaccggcgcagaaaaagagctgcggctccaaagtggcgggcggcgcgggcggtggggttagcaaaccgcacgccaagctcatcctggcaggcggcggcggcggcgggaaagcagcggctgccgccgccgcctccttcgccgccgaacaggcgggggccgccgccctgctgcccctgggcgccgccgccgaccaccactcgctgtacaaggcgcggactcccagcgcctcggcctccgcctcctcggcagcctcggcctccgcagcgctcgcggccccgggcaagcacctggcggagaagaaggtgaagcgcgtctacctgttcggcggcctgggcacgtcgtcgtcgcccgtgggcggcgtgggcgcgggagccgaccccagcgaccccctgggcctgtacgaggaggagggcgcgggctgctcgcccgacgcgcccagcctgagcggccgcagcagcgccgcctcgtcccccgccgccggccgctcgcccgccgaccaccgcggctacgccagcctgcgcgccgcctcgcccgccccgtccagcgcgccctcgcacgcgtcctcctcggcctcgtcccactcctcctcttcctcctcctcgggctcctcgtcctccgacgacgagttcgaagacgacctgctcgacctgaaccccagctcaaactttgagagcatgtccctgggcagcttcagttcgtcgtcggcgctcgaccgggacctggattttaacttcgagcccggctccggctcgcacttcgagttcccggactactgcacgcccgaggtgagcgagatgatctcgggagactggctcgagtccagcatctccaacctggttttcacctactgaagggcgcgcaggcagggagaagggccggggggggtaggagaggagaaaaaaaaagtgaaaaaaagaaacgaaaaggacagacgaagagtttaaagagaaaagggaaaaaagaaagaaaaagtaagcagggctcgttcgcccgcgttctcgtcgtcggatcaaggagcgcggcggcgttttggacccgcgctcccatcccccaccttcccgggccggggacccactctgcccagccggagggacgcggaggaggaagagggtagacaggggcgacctgtgattgttgttattgatgttgttgttgatggcaaaaaaaaaaagcgacttcgagtttgctcccctttgcttgaagagaccccctcccccttccaacgagcttccggacttgtctgcacccccagcaagaaggcgagttagttttctagagacttgaaggagtctcccccttcctgcatcaccaccttggttttgttttattttgcttcttggtcaagaaaggaggggagaacccagcgcacccctccccccctttttttaaacgcgtgatgaagacagaaggctccggggtgacgaatttggccgatggcagatgttttgggggaacgccgggactgagagactccacgcaggcgaattcccgtttggggcctttttttcctccctcttttccccttgccccctctgcagccggaggaggagatgttgaggggaggaggccagccagtgtgaccggcgctaggaaatgacccgagaaccccgttggaagcgcagcagcgggagctaggggcgggggcggaggaggacacgaactggaagggggttcacggtcaaactgaaatggatttgcacgttggggagctggcggcggcggctgctgggcctccgccttcttttctacgtgaaatcagtgaggtgagacttcccagaccccggaggcgtggaggagaggagactgtttgatgtggtacaggggcagtcagtggagggcgagtggtttcggaaaaaaaaaaagaaaaaaaggg

SEQ ID NO: 85 - DNA, 1356 bp, Homo sapiens
ttctcccgcaaccttcccttcgctccctcccgtcccccccagctcctagcctccgactccctccccccctcacgcccgccctctcgccttcgccgaaccaaagtggattaattacacgctttctgtttctctccgtgctgttctctcccgctgtgcgcctgcccgcctctcgctgtcctctctccccctcgccctctcttcggcccccccctttcacgttcactctgtctctcccactatctctgcccccctctatccttgatacaacagctgacctcatttcccgataccttttcccccccgaaaagtacaacatctggcccgccccagcccgaagacagcccgtcctccctggacaatcagacgaattctccccccccccccaaaaaaaaaagccatccccccgctctgccccgtcgcacattcggcccccgcgactcggccagagcggcgctggcagaggagtgtccggcaggagggccaacgcccgctgttcggtttgcgacacgcagcagggaggtgggcggcagcgtcgccggcttccagacaccaatgggaatcccaatggggaagtcgatgctggtgcttctcaccttcttggccttcgcctcgtgctgcattgctgcttaccgccccagtgagaccctgtgcggcggggagctggtggacaccctccagttcgtctgtggggaccgcggcttctacttcagcaggcccgcaagccgtgtgagccgtcgcagccgtggcatcgttgaggagtgctgtttccgcagctgtgacctggccctcctggagacgtactgtgctacccccgccaagtccgagagggacgtgtcgacccctccgaccgtgcttccggacaacttccccagataccccgtgggcaagttcttccaatatgacacctggaagcagtccacccagcgcctgcgcaggggcctgcctgccctcctgcgtgcccgccggggtcacgtgctcgccaaggagctcgaggcgttcagggaggccaaacgtcaccgtcccctgattgctctacccacccaagaccccgcccacgggggcgcccccccagagatggccagcaatcggaagtgagcaaaactgccgcaagtctgcagcccggcgccaccatcctgcagcctcctcctgaccacggacgtttccatcaggttccatcccgaaaatctctcggttccacgtccccctggggcttctcctgacccagtccccgtgccccgcctccccgaaacaggctactctcctcggccccctccatcgggctgaggaagcacagcagcatcttcaaacatgtacaaaatcgattggctttaaacacccttcacataccctcccccc

SEQ ID NO: 86 - DNA, 3114 bp, Homo sapiens
ctccaggcaacttggggcaagcgtctcagttctcgctctcccttcctcccagcggggtcgccgcagaccccagccctgggagcaccgctctgcagcgcggccggcgggtggagacggttggcccctaaactcgctcgtccagcccaaccgccccggcggcttctcccagccctcgaggctctcctgagcggcctggagaggcgtcgagcgcagcccagcgcccgcctgctcacccgccccggcccgggaagggaattttcggatcctgcgagcccggggcgcccccgcggcctagggcgggcagctcccggggcctggccgagccggtggcgcccgggaggccgcggggacagcacgcagcgcgcgcccttggatgccgtcccgcagcgacgccccggcccgccccgctcctcctcctgcctggctagcctgcctctcatttgggaagttttgtgggttttctttctcctcctccaaccttggcggaggccacgactcaggcgccacagctgggggctagaggccgcggaccatggtgcggggcagccaccgctgaagtcagcaaaaccgagcctggcctgaggcaggctgcgcgggaggccaaagccatggccattgccacgtcgacccagctggcccgggcactgtatgacaacaccgctgagtccccccaggagctgtccttccgccgaggggatgtcctacgggtcctgcagagagagggcgctggtggactggacggctggtgcctctgctccctacacggccagcagggcattgtgcccgccaacagggtgaagctcttgcctgctggcccagcacccaagcccagcctctctcctgcgtccccagcccagcctggctcaccatatccagccccagatcacagcaatgaggaccaggaggtgtatgtggtgccgcccccagctcggccctgtccaacctcaggacctccagctggaccttgcccaccctctcctgacctcatctacaaaatccccagagctagtgggacccagctggctgctcccagagatgccttggaggtctacgatgtgccccccaccgccctccgggtgccctccagtggcccctatgactgccctgcctccttttcccaccctctgacccgggttgccccgcagccccctggagaggatgatgctccctatgatgtgcctctgaccccaaagccacctgcagagctggaaccagatctggagtgggaaggaggccgggagccggggccccccatctatgctgccccctccaacctgaaacgagcgtcagccttactcaatttgtatgaagcacccgaggaactgctggcagacggggagggcgggggcactgatgaggggatctacgatgtgcctctgctggggccagaggctcccccttctccagagccccctggagccttggcctcccatgaccaggacaccctggcccagcttctggccagaagccccccacccccacacaggccccggctcccctcagctgagagcctgtcccgccgccctctgcctgccctgcctgtccctgaggcccccagcccctccccagtgccctctcctgccccaggccggaagggcagcatccaggaccggcctctgcccccacccccaccccgcctgcctggttatggaggccccaaggtcgagggggatccagagggcagggagatggaggatgacccagcaggacaccacaatgagtacgagggcattccgatggccgaggagtatgactatgtccacctgaagggcatggacaaagctcagggatctaggcccccggatcaggcctgcacaggggatcctgaactgcccgagagggggatgccggcgccgcaggaggccctgtccccaggggagccactggttgtgtccaccggagatctgcagctcctgtacttctatgctgggcaatgccagagccactactcagccctgcaggcagccgtggcagccctgatgtccagtacccaggctaatcagcccccgcgccttttcgtgccccacagcaagagggtggtggtggctgctcatcgcctggtgtttgttggggacaccctgggccggctggcagcctctgcccctctgagagcacaggtcagggctgcaggtacagcactgggccaggcattgcgggccactgtgctggctgtcaagggagctgccctgggctacccatccagccctgccatccaagagatggtgcagtgtgtaacagaactggcagggcaggccctgcaattcactaccctgctcactagcctggctccatgaaggtcctttggcacagctctgctcctcccctgcctgccaaagcccccctttaggccttgggtggctggaaggctttgttaagggactaggagaaatgggggtatctttcccctttcctgccctttctgctcatctcaacctctcacagaggtgtcttctccccctaacctacagctttttgtacaagccattttgtgtaaattatttatatttaatattattccctgctttgtcaggagcaggtactaggctctggggcagtgaggaactagatccttctctcctcagcctagggtggaggtcactgcactaccacccacctctggaagactggctgtgaaaagtcaggtggcagaaacctggggccacatagagcctctctcttttcctgtttcttggctctagaagatcagcactgcactgttagctgagagtgcgggcaagacataaactgtccagagtttgaaggttctcggaaagaccggagggcttctccccacagaaggcggagagagctggggctcagacatgggtgtgcaccttaataaaccctgctgtctgcctccctgactctgcttcttgggagcatggtgagcagccctggtgctcagcagccatacctatgggacacacactacgaaaaggatgcctttagggtttgggggagattttactcctttcttcaacaactattcactggacaagttctctgctcccatgacgcgccaggcacagttctgcaagtatattgtgaatgtattgttctagtgggatacacaaataagtcagttaaaatacataaataaaaacataaacctgc

SEQ ID NO: 87 - DNA, 2578 bp, Homo sapiens
ctccaggcaacttggggcaagcgtctcagttctcgctctcccttcctcccagcggggtcgccgcagaccccagccctgggagcaccgctctgcagcgcggccggcgggtggagacggttggcccctaaactcgctcgtccagcccaaccgccccggcggcttctcccagccctcgaggctctcctgagcggcctggagaggcgtcgagcgcagcccagcgcccgcctgctcacccgccccggcccgggaagggaattttcggatcctgcgagcccggggcgcccccgcggcctagggcgggcagctcccggggcctggccgagccggtggcgcccgggaggccgcggggacagcacgcagcgcgcgcccttggatgccgtcccgcagcgacgccccggcccgccccgctcctcctcctgcctggctagcctgcctctcatttgggaagttttgtgggttttctttctcctcctccaaccttggcggaggccacgactcaggcgccacagctgggggctagaggccgcggaccatggtgcggggcagccaccgctgaagtcagcaaaaccgagcctggcctgaggcaggctgcgcgggaggccaaagccatggccattgccacgtcggtgtatgtggtgccgcccccagctcggccctgtccaacctcaggacctccagctggaccttgcccaccctctcctgacctcatctacaaaatccccagagctagtgggacccagctggctgctcccagagatgccttggaggtctacgatgtgccccccaccgccctccgggtgccctccagtggcccctatgactgccctgcctccttttcccaccctctgacccgggttgccccgcagccccctggagaggatgatgctccctatgatgtgcctctgaccccaaagccacctgcagagctggaaccagatctggagtgggaaggaggccgggagccggggccccccatctatgctgccccctccaacctgaaacgagcgtcagccttactcaatttgtatgaagcacccgaggaactgctggcagacggggagggcgggggcactgatgaggggatctacgatgtgcctctgctggggccagaggctcccccttctccagagccccctggagccttggcctcccatgaccaggacaccctggcccagcttctggccagaagccccccacccccacacaggccccggctcccctcagctgagagcctgtcccgccgccctctgcctgccctgcctgtccctgaggcccccagcccctccccagtgccctctcctgccccaggccggaagggcagcatccaggaccggcctctgcccccacccccaccccgcctgcctggttatggaggccccaaggtcgagggggatccagagggcagggagatggaggatgacccagcaggacaccacaatgagtacgagggcattccgatggccgaggagtatgactatgtccacctgaagggcatggacaaagctcagggatctaggcccccggatcaggcctgcacaggggatcctgaactgcccgagagggggatgccggcgccgcaggaggccctgtccccaggggagccactggttgtgtccaccggagatctgcagctcctgtacttctatgctgggcaatgccagagccactactcagccctgcaggcagccgtggcagccctgatgtccagtacccaggctaatcagcccccgcgccttttcgtgccccacagcaagagggtggtggtggctgctcatcgcctggtgtttgttggggacaccctgggccggctggcagcctctgcccctctgagagcacaggtcagggctgcaggtacagcactgggccaggcattgcgggccactgtgctggctgtcaagggagctgccctgggctacccatccagccctgccatccaagagatggtgcagtgtgtaacagaactggcagggcaggccctgcaattcactaccctgctcactagcctggctccatgaaggtcctttggcacagctctgctcctcccctgcctgccaaagcccccctttaggccttgggtggctggaaggctttgttaagggactaggagaaatgggggtatctttcccctttcctgccctttctgctcatctcaacctctcacagaggtgtcttctccccctaacctacagctttttgtacaagccattttgtgtaaattatttatatttaatattattccctgctttgtcaggagcaggtactaggctctggggcagtgaggaactagatccttctctcctcagcctagggtggaggtcactgcactaccacccacctctggaagactggctgtgaaaagtcaggtggcagaaacctggggccacatagagcctctctcttttcctgtttcttggctctagaagatcagcactgcactgttagctgagagtgcgggcaagacataaactgtccagagtttgaaggttctcggaaagaccggagggcttctccccacagaaggcggagagagctggggctcagacatgggtgtgcaccttaataaaccctgctgtctgcc

SEQ ID NO: 88 - DNA, 2062 bp, Homo sapiens
gtcagtccctcctgtagccgccgccgccgccgcccgccgcccctctgccagcagctccggcgccacctcgggccggcgtctccggcgggcgggagccaggcgctgacgggcgcggcgggggcggccgagcgctcctgcggctgcgactcaggctccggcgtctgcgcttccccatggggctggcctgcggcgcctgggcgctctgagattgtcactgctgttccaagggcacacgcagagggatttggaattcctggagagttgcctttgtgagaagctggaaatatttctttcaattccatctcttagttttccataggaacatcaagaaatcatgaacaactttggtaatgaagagtttgactgccacttcctcgatgaaggttttactgccaaggacattctggaccagaaaattaatgaagtttcttcttctgatgataaggatgccttctatgtggcagacctgggagacattctaaagaaacatctgaggtggttaaaagctctccctcgtgtcacccccttttatgcagtcaaatgtaatgatagcaaagccatcgtgaagacccttgctgctaccgggacaggatttgactgtgctagcaagactgaaatacagttggtgcagagtctgggggtgcctccagagaggattatctatgcaaatccttgtaaacaagtatctcaaattaagtatgctgctaataatggagtccagatgatgacttttgatagtgaagttgagttgatgaaagttgccagagcacatcccaaagcaaagttggttttgcggattgccactgatgattccaaagcagtctgtcgtctcagtgtgaaattcggtgccacgctcagaaccagcaggctccttttggaacgggcgaaagagctaaatatcgatgttgttggtgtcagcttccatgtaggaagcggctgtaccgatcctgagaccttcgtgcaggcaatctctgatgcccgctgtgtttttgacatgggggctgaggttggtttcagcatgtatctgcttgatattggcggtggctttcctggatctgaggatgtgaaacttaaatttgaagagatcaccggcgtaatcaacccagcgttggacaaatactttccgtcagactctggagtgagaatcatagctgagcccggcagatactatgttgcatcagctttcacgcttgcagttaatatcattgccaagaaaattgtattaaaggaacagacgggctctgatgacgaagatgagtcgagtgagcagacctttatgtattatgtgaatgatggcgtctatggatcatttaattgcatactctatgaccacgcacatgtaaagccccttctgcaaaagagacctaaaccagatgagaagtattattcatccagcatatggggaccaacatgtgatggcctcgatcggattgttgagcgctgtgacctgcctgaaatgcatgtgggtgattggatgctctttgaaaacatgggcgcttacactgttgctgctgcctctacgttcaatggcttccagaggccgacgatctactatgtgatgtcagggcctgcgtggcaactcatgcagcaattccagaaccccgacttcccacccgaagtagaggaacaggatgccagcaccctgcctgtgtcttgtgcctgggagagtgggatgaaacgccacagagcagcctgtgcttcggctagtattaatgtgtagatagcactctggtagctgttaactgcaagtttagcttgaattaagggatttggggggaccatgtaacttaattactgctagttttgaaatgtctttgtaagagtagggtcgccatgatgcagccatatggaagactaggatatgggtcacacttatctgtgttcctatggaaactatttgaatatttgttttatatggatttttattcactcttcagacacgctactcaagagtgcccctcagctgctgaacaagcatttgtagcttgtacaatggcagaatgggccaaaagcttagtgttgtgacctgtttttaaaataaagtatcttgaaataattaggc

SEQ ID NO: 89 - DNA, 2988 bp, Homo sapiens
  misc_feature (9)..(9): n is a, c, g, or t
  misc_feature (1821)..(1821): n is a, c, g, or t
  misc_feature (1829)..(1829): n is a, c, g, or t
  misc_feature (2582)..(2582): n is a, c, g, or t
  misc_feature (2807)..(2807): n is a, c, g, or t
  misc_feature (2979)..(2979): n is a, c, g, or t
actcgctcntccccggcttccgagcacagcatggcggtcaaggtgcagacaactaagcgaggggatcctcatgagttaagaaacatatttctacagtatgccagtactgaggttgatggagagcgttacatgaccccagaagactttgttcagcgctatcttggactgtataatgatccaaatagtaacccaaagatcgtgcagctcttggcaggagtagctgatcaaaccaaggatgggttgatctcctatcaagagtttttggcatttgaatctgttttatgtgctccagattccatgttcatagtggctttccagttgtttgacaagagtggaaatggagaggtgacatttgaaaatgtcaaagaaatttttggacagactattattcatcatcatatcccttttaactgggattgtgaatttatccgactgcattttgggcataaccggaagaagcatcttaactacacagaattcacgcagtttctccaggagctgcaattggaacatgcaagacaagcctttgcactcaaagacaaaagcaaaagtggcatgatttctggtctggatttcagtgacatcatggttaccattagatctcacatgcttactccttttgtggaggagaacttagtttcagcagctggaggaagtatctcacaccaggttagcttctcctacttcaatgcatttaactcgttactgaataacatggagcttgttcgtaagatatatagcactctagctggcacaaggaaagatgttgaagtcacaaaggaggaatttgcccagagtgccatacgctatggacaagtcacaccactagaaattgatattctatatcagcttgcagacttatataatgcttcagggcgcttgactttggcagatattgagagaatagccccattggctgagggggccttaccttacaacctggcagaacttcagagacagcagtctcctgggttaggcaggcctatctggctccagattgccgagtctgcttacagattcactctgggctcagttgctggagctgtgggagccactgcagtgtatcctatagatctggtgaagacccgaatgcaaaaccagcgtggctctggctctgttgttggggagctaatgtacaaaaacagctttgactgttttaagaaagtcttgcgttatgagggcttctttggactctacaggggtctgataccacaacttataggggttgctccagaaaaggccattaaactgactgttaatgattttgttcgggacaaatttaccagaagagatggctctgttccacttccagcagaagttcttgctggaggctgtgctggaggctctcaggtcatttttaccaacccattggagatagtgaagattcgtctgcaagtagctggagagatcaccacgggacccagagtcagcgccctgaatgtgctccgggacttgggaatttttggtctgtataagggtgccaaagcgtgtttcctccgagacattcccttctctgcaatctattttcctgtttatgctcattgcaaactacttctggctgatgaaaatggacacgtgggaggtttaaatcttcttgcagctggagccatggcaggtgtcccagctgcatctctggtgacccctgctgatgtcatcaagacaagactgcaggtggctgcccgcgctggccagacgacatacagtggtgtcatcgactgtttcaggaagattctccgggaagaagggccctcagcattttggaaagggactgcagctcgagtgtttcgatcctctccccagtttggtgttaccttggctcanttatgaanttctccagcggtggttttacattgattttggaggcctcaaacccgctggttcagaaccaacacctaagtcacgcattgcagaccttcctcctgccaaccctgatcacatcggtggatacagactcgccacagccacgtttgcaggcatcgaaaacaaatttggcctttatctcccgaaatttaagtctcctagtgttgctgtggttcagccaaaggcagcagtggcagccactcagtgatgagacaactgttgagtgtggcaaaatggcgccttgaagaaagaggcctaggagagcagccctgtaatgtatccagtcagctgcatggtactgactgagctgaggagtcaaactcttctttctgtatgacatatacatatacttgtttataaaataatcatttgcccagggaaaaaaccacaacgctgtttcaagctttagtcttatgtgttgaaatgtttttgtaagccttggcatgaattagtgttctagactctgctttgcacagcttgcacttacagtgattgtacatattgtacatctttgtacagagacatcttggcacctcatcccaacaaatcacatttgtagaaatgtaatgcggttctgagtggcttgaaatgtacagaatgttttgaaagtgttttattaagaatcacacaaaaataaatgtattaaaattaaattcattctcttattggtgacttatggaaataaagcatcaatattggatgtatttaattcctagtttgtnttccattctggaataaaaaggtatttgctgataaaaggcataacgagacatagtgctgctaccactgaataagtgatactttggaaagatgcatgccagtggatgccagaggaccaggctaatgacttgtgtgtgctgatgtgtttccatttgtatttaatgtgtgtagaccctcctctgttcatcaatcaaaaagcatttcctaggcagctcctcgcctgtcantgtgcatatggaaacagggacatctccatcattactggcttagttttgctttcctttgacacagtaaggcaaaggccaagctttcaaaagagtaaaggatactttcacaatttcccttcatatggatatgattccagtcaaaaataaaatgcacaccaaaatgtaaaaaaanaaaaaaaaa

SEQ ID NO: 90 - DNA, 2549 bp, Homo sapiens
cctccccggcttccgagcacagcatggcggtcaaggtgcagacaactaagcgaggggatcctcatgagttaagaaacatatttctacagtatgccagtactgaggttgatggagagcgttacatgaccccagaagactttgttcagcgctatcttggactgtataatgatccaaatagtaacccaaagatcgtgcagctcttggcaggagtagctgatcaaaccaaggatgggttgatctcctatcaagagtttttggcatttgaatctgttttatgtgctccagattccatgttcatagtggctttccagttgtttgacaagagtggaaatggagaggtgacatttgaaaatgtcaaagaaatttttggacagactattattcatcatcatatcccttttaactgggattgtgaatttatccgactgcattttgggcataaccggaagaagcatcttaactacacagaattcacgcagtttctccaggagctgcaattggaacatgcaagacaagcctttgcactcaaagacaaaagcaaaagtggcatgatttctggtctggatttcagtgacatcatggttaccattagatctcacatgcttactccttttgtggaggagaacttagtttcagcagctggaggaagtatctcacaccaggttagcttctcctacttcaatgcatttaactcgttactgaataacatggagcttgttcgtaagatatatagcactctagctggcacaaggaaagatgttgaagtcacaaaggaggaatttgcccagagtgccatacgctatggacaagtcacaccactagaaattgatattctatatcagcttgcagacttatataatgcttcagggcgcttgactttggcagatattgagagaatagccccattggctgagggggccttaccttacaacctggcagaacttcagagacagcagtctcctgggttaggcaggcctatctggctccagattgccgagtctgcttacagattcactctgggctcagttgctggagctgtgggagccactgcagtgtatcctatagatctggtgaagacccgaatgcaaaaccagcgtggctctggctctgttgttggggagctaatgtacaaaaacagctttgactgttttaagaaagtcttgcgttatgagggcttctttggactctacaggggtctgataccacaacttataggggttgctccagaaaaggccattaaactgactgttaatgattttgttcgggacaaatttaccagaagagatggctctgttccacttccagcagaagttcttgctggaggctgtgctggaggctctcaggtcatttttaccaacccattggagatagtgaagattcgtctgcaagtagctggagagatcaccacgggacccagagtcagcgccctgaatgtgctccgggacttgggaatttttggtctgtataagggtgccaaagcgtgtttcctccgagacattcccttctctgcaatctattttcctgtttatgctcattgcaaactacttctggctgatgaaaatggacacgtgggaggtttaaatcttcttgcagctggagccatggcaggtgtcccagctgcatctctggtgacccctgctgatgtcatcaagacaagactgcaggtggctgcccgcgctggccagacgacatacagtggtgtcatcgactgtttcaggaagattctccgggaagaagggccctcagcattttggaaagggactgcagctcgagtgtttcgatcctctccccagtttggtgttaccttggctcattatgaagttctccagcggtggttttacattgattttggaggcctcaaacccgctggttcagaaccaacacctaagtcacgcattgcagaccttcctcctgccaaccctgatcacatcggtggatacagactcgccacagccacgtttgcaggcatcgaaaacaaatttggcctttatctcccgaaatttaagtctcctagtgttgctgtggttcagccaaaggcagcagtggcagccactcagtgatgagacaactgttgagtgtggcaaaatggcgccttgaagaaagagcctaggagagcagccctgtaatgtatccagtcagcgcatggtactgacgagctgaggagtcaaactcttctttctgtatgtcatatacatatacttgtttataaaataatcatttgcccagggaaaaaaccacaatgctgtttcaagctttagtcttatgtgttgaaatgtttttgtaagccttggcatgaattagtgttctagactctgctttgcacagcttgcacttacgtgattacatattgtacatctttgtacagagacatcttggcacctcatcccaacaaatcacatttgtagaaatgtaatgcggttctgagtggcttgaaatgtacagaatgttttgaaagtgttttattaagaatcacacaaaaataaatgtattaaaattaaattcattctcttattggtgacttatggaaataaagcatcaatattggatgt

SEQ ID NO: 91 - DNA, 3419 bp, Homo sapiens
  misc_feature (14)..(15): n is a, c, g, or t
  misc_feature (504)..(504): n is a, c, g, or t
  misc_feature (526)..(528): n is a, c, g, or t
  misc_feature (532)..(532): n is a, c, g, or t
  misc_feature (535)..(535): n is a, c, g, or t
  misc_feature (537)..(541): n is a, c, g, or t
  misc_feature (543)..(548): n is a, c, g, or t
  misc_feature (555)..(555): n is a, c, g, or t
  misc_feature (3274)..(3274): n is a, c, g, or t
tttttttttttttnntccagaccaagaaacaagcaaactttaatttccgagtacacaattatgaaactatgccagtagcgacctgcatgtttgtctcatctctttagccacttaagttctcaaaacactgccaaagctttccttctctattaaactcccttaagcattactcatactattattcaagtttaagatgtggcaaatctccccaagtgtatatggctggttctcttcttataaatgaatccataagacagtgtcccctaattcatctctattttctctaacctgcttgattttctaaaattggaaaaaagtaattccggtatactaaaaccagagcccaggtttctcaacatcttcagttaaatgacttttaattccccaatcaaggtataacacacaaatgttatctgcgctttacagtatagaactctgagtggctggtgtcttttggttagtgtaaccattacacagcagtatctgcttgtcaccccggtcttntttagcctcaaaaaatattcannntttnttntnnnnntnnnnnnttttttntttttttttttttttttacaaaaagaccaaaaaaattttattgctttacaacaagccagcaacaaacacaactgaatagttataaacatgacacttctaaatcctcaaatggaattccaagaccagagtgtgcttctccactttaatagcatttgttaaaactgaaatccacaacttctggcaagtacttcaatattctcaagcagaatcaatacttaaagaggttaaaagaaaaaactattatcaaacgtattgtctgtgggatgatctaatttaaaagcctttcatgcttgatcctggcagtgctattactgcacattttaagtgaccatcatgggcacttttaagaacctaacttcacaaaaagagctgtcacaagaaaattgttctaaaatcccaatgcacagtaactcatgcctcatttcaactgctttcctcatgatgaaaaaatgtagtcagcctttaacttggcctgataaaagctgtgaaaggtatgccaaatggccccttgtacaaacaggaagcccaaattgttgatcaggcaagaaaaggtgacacttttagatacttcatattattctggaaagcactttcctttcagtgggtgcaaaataactacggattaagtcaccattttaatcatctcaattcaatagcaagagtttcctggcacatactcttagtactacctgaaaattggggcgtgtggggaagaccaccaacagtatttacatgacttgccccaaactgtacatttaaaacatgactgttgggatagtcaccaacaacctgaaatttcttactctaaaacacattaccaaatcccactgatttattttgtgtgtgctttcgtggtttttgtttttatatagagatggagtctcactttgttgcccaggctggtctcgaactcctgagctcaagcagtccccctgcctcggcctcccagtgtgctgggattacaggtgtgagccaccacgcccggcctgacttatttataattcactattttatctttcttccagacaaagcaaagcatttttctctaacaacataatagtcaggattttgcttattaacttacgtgggtggctttatactcccagaacaaatgatctagctgactactaggaaaaaggtttcatagtttaggaatatatcacatcacgtgttagttccaaatgtacatgaagacaatttttaattgctgcaatagcagaatattaaggcaacatcagaaagcagaggtgttttaaaacactaagccctactccctgcctggtggaaaacaaaatgatgttactaaatcccttaatacaaaaactttccaaaataatctgttgagcttgacttcgcagtttaatcttttacagtttgatggcagtgagagagaacctgcagctataattcccttggcaaaagaattcaacatctgatttactcacaatgcttaaaataaggaagggaaaatataaaataagttttccttgcttggcaaccatctttttaattatctatttttatactgtatccaggctatgcctgggtgtggatggctaactcgcatatagaaaatatcaagcatcacatctggaagaatcacaaacgagacaatgaacttctcaatcagtacatcaacagtcaaggtaagcaagaaaaggactttaccaagaaactaacatttacactttctgacggaactgaaatacactgaattacaggcatattcactgaaacaacaaaaaaaattctgtccatgtaaaggctatattttttacccccaaaaaagtgtttcaattctgatactcacaccacaactggttaagaaaataaagcgcagtgtttagcaactgagcatcctaactaccgtaagaggcactctgtgctcaccccttcctggcaaccgctgaggtcagcaaggccaggagcaaggagagcctcctatttttcaacacaagctgctgccgtctccttattaaagccccggatggagagatcatagaccacttcctctactttcttcacgtcatatttcaatccgtcgtagcgcttcctcagggagtcatttttcaggttgagaaggcgaaaaccggaatccagctcattgatgaaggtggagatgtggaggggtcgggagtagtctccagcagtcacgctgttgacagacagcctcgacagttcactggcaagaattagaactcctgagagataatcttctacatccagatgaaatcctttctcccgatctggctcaatgccaagaatttctgtaactgcttctcgagtcactagtgtttctgtttccaaatacacaacaaatgctgccaagaagaccaagcgctgcaacacaaacctccagtgctcatgaaatctgtaatactgttcagcaggaaatttggtcttcaaagatgttagatgtgtttttactgtaccaaaatgttctcgagctttcaaacacctctttggaatgtcctgaaacccagcaccctgatggaccccttgcagtagagttaaaatctctcgagctgtttgttctaaactctgtacaacttttctgatttcctctcggatgtcctgctcggcagccaaaaagccctgcagctccacgaagatctcgctcacagacatggcgccggctgcacaacaatcagccagtgtagcaagggcggccaaggaagtggacgccgcaggcaaccagcgcaatcaatcgcaacggccngccgctaccgccgcgtccccccggtcttacgccacgaccgtcgctagggtcctccgaggctcgcggcgcgccggaggacgggctgtccgccgcgctgcctgaggcgccgtccgctgcgttcggaaccgaggcgcgcgtccaaagg

SEQ ID NO: 92 - DNA, 2103 bp, Homo sapiens
ctctgccgagcctccttaaaactctgccgttaaaatgggggcgggtttttcaactcaaaaagcgctcaatttttttcttttcaaaaaaagctgatgaggtcggaaaaaagggagaagaaaccggcaccctctctgagaggcaacagaagcagcaattgtttcagcgaaaaaagcagcaagggagggagtgaaggaaaaaagcaaaaaagggggcgacacgcaagtgcctgtaggggtgaaaggagcagggaccggcgatctagggggggatcagctacaaaagaaactgtcactgggagcggtgcggccaaggaggaagcagtgctgccaggctctgctccagggcacagctggctggcggctgccctgtccgcagcaaaggggcacaggccggggaccgcgagaggtggcaaagtggcaccgggcgccgaggctgctgagcgctcgccgagacgcggaccggactggctgccccggaactgcggcgactctccctactcagaacttggcctacgtttcccaggactctccccatctccagaggcccccacaaaaccgggaaaggaaggaaaggacagcggcggcagcagctcaatgagtgcctacagcagaaagcctgaacgagctcggtcgtaggcgggaagttcccgggggctgcccagtgcagccgcaatgctgccgcgagctgccccagcagtccgggctccgtagacgctttccgcatcactctccttcctcgggctgccgggagtcccgggacctggcggggccggcatgacgggcttctcgggggcccgccgcacgcccggcagcctccggagacgcgcgccgagcccggctcccacggcctctgaggctcggcggggctgcggctgcctggcgggcgggctccggagctttcctgagccggcattagcccacggcttggcccggacgcgaccaaaggctcttctggagaagcccagagcactgggcaatcgttacgacctgtaacttgagggccaccgaactgctactcccgttcgcctttggcgatcatcttttaaccctccggagcacgtcagcatccagccaccgcggcgctctcccagcagcggaggacccaggactatcccttcggcgagacggatggaaaccgagccccctggaggacctgcccctgcagttctgcctcacacggctcaagtcaccaccgtgaacaagggaccctaaagaatggccgagccttgggggaacgagttggcgtccgcagctgccaggggggacctagagcaacttactagtttgttgcaaaataatgtaaacgtcaatgcacaaaatggatttggaaggactgcgctgcaggttatgaaacttggaaatcccgagattgccaggagactgctacttagaggtgctaatcccgatttgaaagaccgaactggtttcgctgtcattcatgatgcggccagagcaggtttcctggacactttacagactttgctggagtttcaagctgatgttaacatcgaggataatgaagggaacctgcccttgcacttggctgccaaagaaggtcacctccgggtggtggagttcctggtgaagcacacggccagcaatgtggggcatcggaaccataagggggacaccgcctgtgatttggccaggctctatgggaggaatgaggttgttagcctgatgcaggcaaacggggctgggggagccacaaatcttcaataaacgtggggagggctcccccacgttgcctctactttatcaattaactgagtagctctcctgacttttaatgtcatttgttaaaatacagttctgtcatatgttaagcagctaaattttctgaaactgcataagtgaaaatcttacaacaggtttatgaatatatttaagcaacatctttttaacctgcaaaatctgttctaacatgtaattgcagataactttgactttcttctgaatattttatctttccttggcttttcccttgcttccccttttgccaatctcaacacccaagttgaagactttgtttttaaaatggtttgtcctgatgcttttgtctaattaaaacactttcaaaacaggaaaaaaaaaaaaaaaaaa

SEQ ID NO: 93 - DNA, 600 bp, Homo sapiens
ccgatgccatcatgcagcctggttaggagcaaaggaaaggggaaaaagaaaaacgactaattcatcttttcctgatcgtcaggaccctaaagaatggccgagccttgggggaacgagttggcgtccgcagctgccaggggggacctagagcaacttactagtttgttgcaaaataatgtaaacgtcaatgcacaaaatggatttggaaggactgcgctgcaggttatgaaacttggaaatcccgagattgccaggagactgctacttagaggtgctaatcccgatttgaaagaccgaactggtttcgctgtcattcatgatgcggccagagcaggtttcctggacactttacagactttgctggagtttcaagctgatgttaacatcgaggataatgaagggaacctgcccttgcacttggctgccaaagaaggccacctccgggtggtggagttcctggtgaagcacacggccagcaatgtggggcatcggaaccataagggggacaccgcctgtgatttggccaggctctatgggaggaatgaggttgttagcctgatgcaggcaaacggggctgggggagccacaaatcttcaataa

SEQ ID NO: 94 - DNA, 4142 bp, Homo sapiens
gctggaggtggcctcccctccgccccagacaagaagaggccctcagccctcccccggtctcagagagccctgagaggaggcccagtccagagctcttcctccgttcccagtccacttctctagggccagtagcagacaccagccagtatgccgaggaaccagggcttctccgagcccgaatactcggccgagtactcagccgagtactccgtcagcctgccctccgaccctgaccgcggggtgggccggacccatgaaatctcggtccggaactcgggctcctgcctgtgcctgcctcgcttcatgcggctgactttcgtgccggagtccttggagaacctctaccagacctacttcaaaaggcagcgccacgagaccctgctggtgctggtggtctttgcagccctctttgactgctacgtggtggtcatgtgtgctgtggtcttctccagcgacaagctggctcccctcgccgtggctggaattggactggtgttggacatcatcctcttcgtgctctgcaaaaaggggctgctcccggaccgggtcacccgcagagtgctgccctacgtgctgtggctgctcataaccgcccagatcttctcctacctgggcctgaacttcgcgcgtgcccacgcggctagtgacacggtgggctggcaggtcttctttgtcttctccttcttcatcacgctgcccctcagcctcagccccatcgtgatcatctccgtggtctcctgtgtggtgcacacgttggtcctgggggtcaccgtggcccagcagcagcaggaggagctcaaggggatgcagctgctgcgggagatcctggccaacgtcttcctctacctgtgcgccatcgctgtgggcatcatgtcctactacatggctgaccgcaagcaccgcaaggccttcctggaggcccgccagtcgctggaggtgaagatgaacctggaagagcagagccagcagcaggagaacctcatgctttccatcctgcccaagcacgtggctgacgagatgctgaaagacatgaagaaagacgagagccagaaggaccagcagcagttcaacaccatgtacatgtaccgtcacgagaacgtcagcatcctctttgccgacatcgtgggctttacccagctgtcttctgcctgcagtgcccaggagcttgtgaagctgctcaacgagctctttgcccgctttgacaagctggcagctaaataccaccagctgcggattaagatcctgggcgactgctactactgcatctgcggcttgcctgactaccgggaggaccacgccgtctgctccatcctcatggggctggccatggtggaggccatctcgtatgtgcgggagaagaccaagactggggtggacatgcgtgtgggggtgcacacgggcaccgtgctggggggcgtcctgggccagaagcgctggcagtacgacgtgtggtcgactgatgtcactgtagccaacaagatggaggccggcggcatccctgggcgcgtgcacatctcccagagcaccatggactgcctgaaaggggagtttgatgtggagccaggcgatgggggcagccgctgtgattacctagaagagaagggtattgaaacctacctcatcattgcctccaagccagaggtgaagaaaacagccacccagaatggcctcaatggctcggccctgcccaatggagcaccagcttcctcaaagtccagctcccctgccctcattgagaccaaggagcccaacgggagtgcccacagcagtgggtccacgtcggagaagcccgaggagcaggatgcccaggccgacaacccctcattccccaacccacgccggaggctgcgcctgcaggacctggctgaccgagtggtggatgcctctgaagatgagcacgagctcaaccagctgctcaacgaggccctgcttgagcgagagtccgcccaagtagtaaagaagagaaacaccttcctcttgtccatgcggttcatggaccccgagatggaaacccgctactcggtggagaaggagaagcagagtggggctgccttcagctgctcctgcgtcgtcctgctctgcacggccctggtcgagatactcatcgacccctggctaatgacaaactatgtgaccttcatggtgggggagattctgctcctcatcctgaccatctgctccctggctgccatctttccccgggcctttcctaagaagcttgtggccttctcaacttggattgaccggacccgctgggccaggaacacctgggccatgctcgccatcttcatcctggtgatggcaaatgtcgtggacatgctcagctgtctccagtactacacgggacccagcaatgcaacggcagggatggagacggagggcagctgcctggagaaccccaagtattacaactatgtggccgtgctgtccctcatcgccaccatcatgctggtgcaggtcagccacatggtgaagctcacgctcatgctgctcgtcgcaggcgccgtggccaccatcaacctctatgcctggcgtcccgtctttgatgaatacgaccacaagcgttttcgggagcacgacttacctatggtggccttagagcagatgcaaggattcaaccctgggctcaatggcactgacaggctgcccctggtgccttccaagtactctatgacggtgatggtgttcctcatgatgctcagcttctactacttctcccgccacgtagaaaaactggcacggacacttttcttgtggaagattgaggtccacgaccagaaggaacgtgtctatgagatgcgacgctggaacgaggccttggtcaccaacatgttgcctgagcacgtggcacgccatttcctggggtccaagaagagagatgaggagctgtatagccagacgtatgatgagattggagtcatgtttgcctccctgcccaactttgctgacttctacacagaggagagcatcaacaatggtggtattgagtgtctgcgtttcctcaatgaaatcatctcagattttgactctctcctggacaatcccaagttccgggtgatcaccaagatcaaaaccattggcagcacgtatatggcggcttcaggagtcacccccgatgtcaacaccaatggctttgccagctccaacaaggaagacaagtccgagagagagcgctggcagcacctggctgacctggccgacttcgcgctggccatgaaggatacgctcaccaacatcaacaaccagtccttcaataacttcatgctgcgcataggcatgaacaaaggcggggttctggctggggtcatcggagcccggaaaccacactacgacatctggggcaatacagtcaatgtagccagcaggatggagtccacgggggtcatgggcaacattcaggtggtagaagaaacccaagtcatcctccgagagtacggcttccgctttgtgaggcgaggccccatctttgtgaaggggaagggggagctgctgaccttcttcttgaaggggcgggataagctagccaccttccccaatggcccctctgtcacactgccccaccaggtggtggacaactcctgaatggcctcgagcctgaaacagtccaaaccggaagggagaatttattttttgaaactgaaggaagtcccgaccttcctggattgaagtgcacactcatggactttaggtttagaaacctcctcagccttcatttgttcgtggatgtgtgagctctgagggtggccctgctattcctctgcgtgcctgtagtgtccccagcataggggtcttaggcatagggctgaacagtccttccagagccctcgttccaatccctgccgtccttgcccctgaggggccctgaccactgtgagcaggagggtggcagagctgggacaaagctgcctttgccgctgggctttccgggactgtggagggagcacaggcggggaagctccacttcagacagggcttggtggggcaggacatggctcccattttgaagggaggtctccatgtggtccgagtgaggtgagacggccctcgtcctggtgttcctgatcatcttgaaaggttcttctggaactcctgtccccttagtcatgagaacagaaagtgcaatatttcctttcacctggccc

SEQ ID NO: 95 - DNA, 1763 bp, Homo sapiens
gcactggactgagaaccttcaccaaaaaaatgtctgcccagagacagatgaggtccttcagctccagtgctgattggttcttttccaaaggcccatctaatcctaccacgcacggaaatatccacaggtttttattctttctgccagctacatcagatccatcaggtccgagctgagttgactaccactacttttccctttgtctcaattatgtcttggaagaaggctttgcggatccccggaggccttcgggcaccaactgtgaccttgatgctggcgatgctgagcaccccagtggctgagggcagagaccctcccgaggatttcgtgctccagtttaaggccatgtgctacttcaccaatgggacggagcgcgtgcgttatgtgaccagatacatctataaccgagaggaggacgtgcgcttcgacagcgacgtgggggtgtatcgggcggtgacggcgcaggggcggcctgacgccgagtactggaacagccagaaggacatcctggagaggacccgagcggagttggacacggtgtgcagacacaactacgaggtggcgttccgcgggatcttgcagaggagagtggagcccacagtgaccatctccccatccaggacagaggccctcaaccaccacaacctgctggtctgctcggtgacagatttctatccaggccagatcaaagtccggtggtttcggaatgaccaggaggagacagctggcgttgtgtccaccccccttattaggaacggtgactggaccttccagatcctggtgatgctggaaatgactccccagcatggagacgtctacacctgccacgtggagcaccccagcctccagagccccatcaccgtggagtggcgggctcagtctgaatctgcccagaacaagatgctgagtggcattggaggcttcgtgctggggctgatcttcctcgggctgggccttatcatccgtcaaaggagtcagaaaggacctcaagggcctccaccagcagggcttctgcactgactcctgagactattttaactaggattggttatcactcttctgtgatgcctgcttgtgcctgcccagaattcccagctgcctgtgtcagcttgtcccccgagatcaaagtcctacagtggctgtcacgcagccaccaggtcatctcctttcatccccaccccaaggcgctggctgtgactctgcttcctgcactgacccagagcctctgcctgtgcacggccagctgcgtctactcaggtcccaaggggtttctgtttctattctctcctcagactgctcaagagaagcacatgaaaaacattacctgactttagagcttttttacataattaaacatgatcctgagttaaaaaaaaaaaaggaaatcgctgcagaatgaaggaatatcccttgaggtgacccagccaacctgtggccagaaggagggttgtaccttgaaaagaccactgaaagcattttggggtgtcaagtaagggtgggcagaggaggtagaaaatcaattcaattgtcgcatcattcatggttctttaatattgatgctcagtgcattggccttagaatatcccagcctctcttctggtttggtgagtgctgtgtaagtaagcatggtagaattgtttggagacatatatagtgatccttggtcactggtgtttcaaacattctggaaagtcacatcgatcaagaatattttttatttttaagaaagcataaccagcaataaaaatactatttttgagtct

SEQ ID NO: 96 - DNA, 1049 bp, Homo sapiens
  misc_feature (10)..(13): n is a, c, g, or t
  misc_feature (15)..(15): n is a, c, g, or t
  misc_feature (17)..(17): n is a, c, g, or t
  misc_feature (21)..(24): n is a, c, g, or t
  misc_feature (27)..(27): n is a, c, g, or t
  misc_feature (29)..(29): n is a, c, g, or t
  misc_feature (31)..(32): n is a, c, g, or t
  misc_feature (39)..(39): n is a, c, g, or t
  misc_feature (52)..(52): n is a, c, g, or t
  misc_feature (81)..(81): n is a, c, g, or t
  misc_feature (88)..(88): n is a, c, g, or t
  misc_feature (99)..(99): n is a, c, g, or t
  misc_feature (110)..(110): n is a, c, g, or t
  misc_feature (141)..(141): n is a, c, g, or t
  misc_feature (151)..(151): n is a, c, g, or t
  misc_feature (154)..(154): n is a, c, g, or t
  misc_feature (168)..(168): n is a, c, g, or t
  misc_feature (183)..(183): n is a, c, g, or t
  misc_feature (185)..(185): n is a, c, g, or t
  misc_feature (194)..(194): n is a, c, g, or t
  misc_feature (223)..(223): n is a, c, g, or t
  misc_feature (230)..(230): n is a, c, g, or t
  misc_feature (312)..(312): n is a, c, g, or t
  misc_feature (317)..(317): n is a, c, g, or t
  misc_feature (351)..(351): n is a, c, g, or t
  misc_feature (417)..(417): n is a, c, g, or t
  misc_feature (436)..(436): n is a, c, g, or t
  misc_feature (439)..(439): n is a, c, g, or t
  misc_feature (442)..(446): n is a, c, g, or t
  misc_feature (448)..(452): n is a, c, g, or t
  misc_feature (490)..(490): n is a, c, g, or t
  misc_feature (504)..(504): n is a, c, g, or t
  misc_feature (537)..(537): n is a, c, g, or t
  misc_feature (563)..(563): n is a, c, g, or t
  misc_feature (567)..(567): n is a, c, g, or t
  misc_feature (585)..(585): n is a, c, g, or t
  misc_feature (623)..(623): n is a, c, g, or t
  misc_feature (634)..(634): n is a, c, g, or t
  misc_feature (636)..(636): n is a, c, g, or t
  misc_feature (697)..(697): n is a, c, g, or t
  misc_feature (714)..(714): n is a, c, g, or t
  misc_feature (747)..(747): n is a, c, g, or t
  misc_feature (758)..(758): n is a, c, g, or t
  misc_feature (760)..(760): n is a, c, g, or t
  misc_feature (767)..(767): n is a, c, g, or t
  misc_feature (783)..(783): n is a, c, g, or t
  misc_feature (813)..(813): n is a, c, g, or t
  misc_feature (831)..(831): n is a, c, g, or t
  misc_feature (835)..(835): n is a, c, g, or t
  misc_feature (840)..(840): n is a, c, g, or t
  misc_feature (849)..(849): n is a, c, g, or t
  misc_feature (855)..(855): n is a, c, g, or t
  misc_feature (887)..(887): n is a, c, g, or t
  misc_feature (949)..(949): n is a, c, g, or t
  misc_feature (987)..(987): n is a, c, g, or t
  misc_feature (994)..(994): n is a, c, g, or t
  misc_feature (1008)..(1009): n is a, c, g, or t
  misc_feature (1033)..(1033): n is a, c, g, or t
accatgaacnnnntntntttnnnnttntntnntttagantcaaaaatagtanttttattgctggttatgctttcttaaaantaaaaantattcttgatngatgtgacttnccagaatgtttgaaacaccagtgaccaaggntcactatatntgnccccaaacaattcnaccatgcttacttananagcactcancaaaccagaagagaggctgggatattctnaggccantgcactgagcatcaatattaaagaaccatgaatgatgcgacaattgaattgattttctacctcctctgcccacccttacttnacacnccaaaatgctttcagtgtcttttcaaggtacaancctccttctggccacaggttggctgggtcacctcaagggatgttccttcattctgcagtgatttcntgcctcttctcaattaagnaanttnnnnntnnnnntaactcaggatcatgtttaattatgtaaaaaagctctnaagtcaggtaatgnttttcatgtgcttctcttgagcagtctgagganagaatagaaacagaaaccccttgggncctnagtagacgcagctggccntgcacaggcagaggctctgggtcagtgcaggaagcagngtcacagccancngccttggggtggggatgaaaggagatgacctggtggctgcgtgacagccactgtaggactntgatctcagggggacangctgacacaggcagctgggaattctgggcaggnacaagcaggcntnacagaanagtgataaccaatccnagttaaaatagtctcaggagtcagtgcagnagccctttctgactcctntganggatnataaggccnagcccnaggaagatcagccccagcacgaagcctccaangccactcagcatcttgctctgggcagattcagactgagcccgccactccacggtgatggggntctggaggctggggtgctccacgtggcaggtgtagacntctccangctggggagtcatnntccagcatcaccaggatctggaangtccagtcaccgttcc

SEQ ID NO: 97 - DNA, 2208 bp, Homo sapiens
  misc_feature (1327)..(1330): n is a, c, g, or t
  misc_feature (1332)..(1333): n is a, c, g, or t
attggaggggacagcggtatcctgggaagagccccagggcatgaatgtggggataaggcattgggactctatcaggtatcctgaggagagactcccaccacgtatcctgagaagcacctcaccccctccagaccccaactcccatcacccagcttggtcagcttctcacaaggcctttctcctgcaggtaccatgatgtggggtgcaggcagccctctggcctggctctcagctggctcaggcaacgtgaatgtaagcagcgtgggcccagcagaggggcccacaggtccagccgcaccactgccctcgcctaaggcctgggatgtggtgctctgcatctcaggcaccctggtgtcctgcgagaatgcgctagtggtggccatcatcgtgggcactcctgccttccgtgcccccatgttcctgctggtgggcagcctggccgtggcagacctgctggcaggcctgggcctggtcctgcactttgctgctgtcttctgcatcggctcagcggagatgagcctggtgctggttggcgtgctggcaatggcctttaccgccagcatcggcagtctactggccatcactgtcgaccgctacctttctctgtacaatgccctcacctactattcagagacaacagtgacacggacctatgtgatgctggccttagtgtggggaggtgccctgggcctggggctgctgcctgtgctggcctggaactgcctggatggcctgaccacatgtggcgtggtttatccactctccaagaaccatctggtagttctggccattgccttcttcatggtgtttggcatcatgctgcagctctacgcccaaatctgccgcatcgtctgccgccatgcccagcagattgcccttcagcggcacctgctgcctgcctcccactatgtggccacccgcaagggcattgccacactggccgtggtgcttggagcctttgccgcctgctggttgcccttcactgtctactgcctgctgggtgatgcccactctccacctctctacacctatcttaccttgctccctgccacctacaactccatgatcaaccctatcatctacgccttccgcaaccaggatgtgcagaaagtgctgtgggctgtctgctgctgctgttcctcttccaagatccccttccgatcccgctcccccagtgatgtctagctgagtcttcatgacccttcaaccctgattactacagaattccagaatgttaggctctccagggcttctttccaaacccccagctccacaccccccagacccagctggttctggagttctaggacattgggtgtttcaaggnnnngnncagatccctatgggggcccagctggctccacggttccagaatgttcaggtggtcagtgttctactcagaaatgtctcacagcccagctgggttgcaattccagaatgctgggagttttacagtgccattccaagtcccagatgtccctcttcccccaaacttgaccttgaccatgtcactttacgtttgaatttctgagctaaagagtcagagagattagtcacatagttgcctaaataggagagagaaagattatatatgcacatatacaaagacagtgtctatttatgattgatttatttatttataaatttacttatgggtggtaaggggcaaaaaagaggcccacaccttgatatccaggccataccagggtatcccttgtcccttcacccccatttctgacctcagttcctggaggggggaaagggtgaaagagaaaccacgtattttgttattattttggattattttttatcgaagagatcatagaaaccagagccttctccccaggcctgccctcctcgggtttggaaggggaacacaccagcctctggttttttatttttttaagaagccatcacctgagcaaccaaaaattcctctgcgctggggtccgactgccctctggtggccatttggggaaaactgcagcccggccaggcagctgggaccagaatgcaaccccagctccactccagcctggcgtccagggccacagccatggcctgggggccaagcctcaccctgcggtgccctaaaggagggggggcacgagccaacaccccacccctctgccaaccggggtatggcccccagtgcattccctgttcccgtctccaacccaactcaataaaaaatgattttgtcataaa

SEQ ID NO: 98 - DNA, 5053 bp, Homo sapiens
  misc_feature (171)..(174): n is a, c, g, or t
  misc_feature (176)..(176): n is a, c, g, or t
  misc_feature (179)..(179): n is a, c, g, or t
  misc_feature (181)..(181): n is a, c, g, or t
  misc_feature (183)..(186): n is a, c, g, or t
  misc_feature (189)..(189): n is a, c, g, or t
  misc_feature (939)..(939): n is a, c, g, or t
  misc_feature (1019)..(1019): n is a, c, g, or t
  misc_feature (1653)..(1653): n is a, c, g, or t
  misc_feature (1665)..(1665): n is a, c, g, or t
  misc_feature (2803)..(2803): n is a, c, g, or t
  misc_feature (3774)..(3776): n is a, c, g, or t
  misc_feature (3778)..(3778): n is a, c, g, or t
  misc_feature (3780)..(3780): n is a, c, g, or t
  misc_feature (3782)..(3788): n is a, c, g, or t
  misc_feature (4545)..(4545): n is a, c, g, or t
  misc_feature (4862)..(4862): n is a, c, g, or t
gcagccatcctggaggcctggcagaggacatatgtggaggtggttcatcagagtgtcgcacagaactccactcaaaaggtgctttccttcaccaccacgaccctggacgacatcctgtaatccttctctgacgtcagtgtcatccgcgtggccagcggctacttactcatnnnngnccngncnnnnggnctgaggcggcgctgtgtgtgtgaagcgtacctagggcgggaggcgacatggagacaggggcggccgagctgtatgaccaggcccttttgggcatcctgcagcacgtgggcaacgtccaggatttcctgcgcgttctctttggcttcctctaccgcaagacagacttctatcgcttgctgcgccacccatcggaccgcatgggcttcccgcccggggccgcgcaggccttggtgctgcaggtattcaaaacctttgaccacatggcccgtcaggatgatgagaagagaaggcaggaacttgaagagaaaatcagaagaaaggaagaggaagaggccaagactgtgtcagctgctgcagctgagaaggagccagtcccagttccagtccaggaaatagagattgactccaccacagaattggatgggcatcaggaagtagagaaagtgcagcctccaggccctgtgaaggaaatggcccatggttcacaggaggcagaagctccaggagcagttgctggtgctgctgaagtccctagggaaccaccaattcttcccaggattcaggagcagttccagaaaaatcccgacagttacaatggtgctgtccgagagaactacacctggtcacaggactatactgacctggaggtcagggtgccagtacccaagcacgtggtgaagggaaagcaggtctcagtggcccttagcagcagctccattcgtgtggccatgctggaggaaaatggggagngcgtcctcatggaagggaagctcacccacaagatcaacactgagagttctctctggagtctcgagcccgggaagtgcgtnttggtgaacctgagcaaggtgggcgagtattggtggaacgccatcctggagggagaagagcccatcgacattgacaagatcaacaaggagcgctccatggccaccgtggatgaggaggaacaggcggtgttggacaggcttacctttgactaccaccagaagctgcagggcaagccacagagccatgagctgaaagtccatgagatgctgaagaaggggtgggatgctgaaggttctcccttccgaggccagcgattcgaccctgccatgttcaacatctccccgggggctgtgcagttttaatgaccagaaggaaaggaaaccctcgccggtggggaggcagagccttatcctcggctgcccttcttggctccctgcattccagggacttgctcgtcttgtttacccctagccatcctttctttcaagggtgaaccaggccttccaccctgaccttgcatctccagactgttccagagaaggtgcggggccagctgctatgtggtggccgctgtggctgacactgagtgaaggtgtttgaaatgcaggagaggatatcccagcaaattgggatcacatgcttttgtctccacagcaaccagccactgcaggcagcatgtctttcctcccctgnctctctgcttgnctgttgttttgacgctattctgcttgcatgtcttctggttgggatgtggagttgttgctggactctcaggcgaagctgaagtcattgaagtgtgtgaagctctgtgcttgcatgagggcaagcaaggaatggctgtgcctgaggctgctctgggaaactccttgccccttgacctcttttgagagcattcacgtggtcttcttgctcatccccttataaatgtgctttgcctgcctcagcctcatggtcagagcagtggagactggagccctgtttgcacgttctagttgttcggagaaagcctaggttctgggctcaggtccagatgcagcggggattctgttctctgactgtggcgaccttgctttggttcttgttgaagtgaaccaagcccggccaccacgcatggcatgctgtgcttggctccccataagacgtcctctttgggtgcacggtgtcaaagtgtgggcaggagtggagagctggtgccctcaggaggagaccacagcatgtccatcagctcagcagagctcgacagccacaagtcctgagaagctttgaccttgaagggcttctgggagaggaggaatttctgcatggggcgtgaaggcacactgtcccaccacaactgaaccagaagagagtgaagactcccctcttcccatcctctgtgccaggtgccagactgtgctccttggaacttatggcccaatcttacctgttctccagggactggtcactgcctcaggacccccaagcctatgccctgagccatggctgctgactgactccagccaaggtgcaaagacgagattatgagacaggtcctcaggcctgtgttccaagtactcacaggggctctgggtgcccatcgccgggagtatggttcagctgccaccggcactgtccatttgcctgtctgtcaagctcagagcatggataagccacacagcagggcagtgcaccctggcaccatgcacggccagcaagaatcaaggcccgcagatgctaagagggcctattgtcaggggaaggtccccgctcctgcacactctctatggatacttgggttgtgggggctctcttggagagtaagtttgtggtttgtttctggtttacagtggtggctgacaccccnttgtaagaaagcattcctgggaagtcttctgtgggtccaaacatgttgctccgatcatcacaggagagcaaaaggccctagataccccctttggaatgtgagagtcttgttgtctgatatttgccactgagctggtgaagcccctctaaagagatctcgaccctggggagcagaattcttgtcatctatgaggggtcctgagaaagacttgtcattttttttcctggagttcttcccattgaggtcctaggatttgcacaccactgtcccacaagagctttcctgcctaatgaaaggaggtcttgtggtgtgtgtctcctctcttctctatagttcccgagttggcccccattgcagcccccaccctgtgggtagtcttccagaagtgatgcagtggtgtgagatgccctacaccttgttatttgggagactttgagagtcattcacttccatggtgactagtgtttgttttgcctgattttatattctgtgttgcatttctccccactccctgccctgctttaataaacagcaaaccaatatctaggaagaatgactgagggatagtattgggtattggccccatggcaggaacagccacttgcatctggtcccggtgccacactgcggtgcttggtgtggttgtggagcctgtccctgcgcgccttgctcccgttgagccacgctgtctggtgggtgattctctgccctgagccaccaccctggactggcccagtctccagagctggcacaccctgcctgttttctctttttagacacaacagccgcagtttggccagccactaagtcccaccagctgaggtccgaggaaagcggggtgactcatttcccttgtccagggcccgaggagagtgaggtgtccagcctgcaaagctattccagctccttggtgttggtttgcaataaattggtatttaagcaaaaaaaaaaaaaaaaaaaaaaaaaaaaannnananannnnnnnctgtgcatggtcattattgttgcattctagccttgaggtcccaggccaacgtacacagcaaacaccagcatggggaattcttaggggttgtttcccatctggtctgaatgcactgggcaagatctcaatacagctttagaaatcctgtaagattttgaccagtggggagaaaaagaatgtagctatagatcttacatcctttcaaacaggttctggaattctgtagttactggaaagcttagggtgagtgcagagttgggaatgattccactgaagggccacctttgcccaccaggctccaaggccctccttggtctccaggtgcatacctgctgttaactttgctgagccctcgcaatgggcttcctccaggacataacgccgtgtctgacacagaagtctcccaggtggctggccacctgcttcttcctcagtcagatctttgactctccttctctgtgcccaccccatctccagcctcctctgaccctgctcacccctggggacaggacctaggggtgtgagaagtacttggctgaataaagactgtttcaaaggcaatccttagaattgcctagcatactcccagggccagaaataacccgccagaaaggagaggcgtatttgcccctgaagagtgcaggagggagaacagttgagaagtgttttgtgtggaaatgtgtccaagaggcgtcagctgctgcacagagaactcactgcccagaacactgcgcttggggaacagacctcacccccnacctcaaatctgctctccactgggcctgttggcagccagctcagctggggaagggacagcatgactcgctttgtcgatgaaaagcacgaagttgtcagcacagaacctggccagtccttgagaaactccctccttggtggtcagaggtcaagcagcccatgtggcccacggtcctgaagaactgggctatgtccctgaggctcctctctaccgtctgactgtggggtctggggaacaggcatttaaaccaggctgctgccctggggagtgcccactggacgccagggtgccccatagggacagggtcacaaagcccnggggcttcccctgccagtcctggtgaggacagtgtggtcactatctcagagagacgaaaaatgaatattctgtcatttcagactaaactactcacccagctcacactaatatggatttgttaattttacctttttttttctttccaactttaggttcaagggttgttacatgggtaaattggatcataggg

SEQ ID NO: 99 - DNA, 2022 bp, Homo sapiens
ggcacgagggtcactcgcagttgtgagcggccgcctctcccggggacaatgtgggactgagcggcccagccgccgtgccgccgccgccgccgccgcaggacagccccagcgagagccggccaggttgcagcgcggacacactcgcaggtcgctgtggccccagcctcgcctgacagaatgagcggctcggacgggggactggaggaggagccagagctcagcatcaccctcacgctgcggatgctgatgcacgggaaggaagtgggcagcatcatcgggaagaagggcgagactgtaaagcgaatccgggagcagagcagtgcccggatcaccatctccgagggctcctgccctgaacgcatcaccaccatcaccgggtctacagcagctgtcttccatgcagtctccatgattgctttcaaactggatgaggacctttgtgctgctcctgcaaatggtggaaatgtctccaggcctccagtgaccctgcgccttgtcatccctgccagtcagtgtggctcactgattgggaaggctggcaccaagatcaaggagatccgagagactacgggtgcccaggtacaggtggcaggggacctgctccccaactccacagagcgagctgttacggtatctggggtgcctgatgccatcatcctgtgtgtgcgccagatctgcgctgttatcctggagtccccacccaaaggagccactatcccctaccatccgagcctctccctaggtactgttcttctctctgccaaccagggcttctctgtccagggtcagtatggggctgtgaccccagctgaggtcaccaagctccagcagctctcaagccatgcggtcccctttgccacacccagcgtggtgccaggactggatcccggcacacagaccagctcacaggagttcttggttcccaacgatttgattggctgtgtgatcgggcgccagggcagcaagatcagcgagatccggcagatgtcaggggcacatatcaagatcgggaaccaagcagagggcgctggggagcggcatgtcaccatcactggctctccggtctccatcgccctggcccagtacctcatcactgcctgtctagagacggccaagtctacctctggggggacgcccagctcggcccccgcagacctgcctgcccccttctcgccacccctgacggccctgcccacagctccccctggcctgctgggcacaccctatgccatctccctctccaacttcatcggcctcaagcccatgcccttcttggctttaccacctgcttccccagggccgccgccgggcttggcggcctacactgccaagatggcagcagctaatgggagcaagaaggctgagcggcagaaattctccccctactgaggccagctgaggtacaggcaggggcaggcaggaccaccagcagggggctgcctctgcaccctacccgcccaaggagactccaccctggggtcccaaacgccgctaacgcccagacgcatggatgcaccccctaccctgcctccatctatgggagttctttctctcagagtgggggcagtttctggcccaggggtctgagctgcggcagccccagggcagggggccctacctcctcagctctgtgcttggatacagggagcagccaggagactccctagtgcccccaccatggcgggtgtcactcacgcactccccatcccttagggcttcctggcctactgcatccttgtgggagtcagggaggagggcccgttgggtagctggggccaggcttctctccccaccacctgcagatttcttgctgcttccactgatacccttttgactggaatgaactggctgggcttgtcagggggcaccccaaagagggggcactgccaggtagctgggggagtggcatggggcaggggcccagttctcagcagcagacactctgtacagttttttcaatccctgtttttgaataaatattctcagcgaccaaaaaaaaaaaaaaaaaaaaaaaaaaaaaaa

SEQ ID NO: 100 - DNA, 474 bp, Homo sapiens
  misc_feature (24)..(24): n is a, c, g, or t
  misc_feature (282)..(282): n is a, c, g, or t
aggccgtctgcttcatccctgggnagggccacaccctgcaggagcaccagattgtccttgtggagggcggccgcacccaggacctgccaggcgtcaagctcaccgttgtgcgtggcaagtacgactgtggccacgtgcagaagaagtgacggctgggggcacagtgggctgggcgcccctgcagaacatgaaccttccgctcctggctgccacagggtcctccgatgctggcctttgcgcctctagaggcagccactcatggattcaagtcctggctccgcntcttccatcaggaccactattaagccataggagtcctgggggtgcaaagggtgcccctctgtcaacacccttggctcctgtgtttagaggggtggcctgaaggaccttttctgctgggacaagacactgtactgccctctgctgggaaggggttttaataaacagaccctggcgcttgtgatgtaaaaaaac

SEQ ID NO: 101 - DNA, 6713 bp, Homo sapiens
gtctgctcctcacactgcagctgctgggccgtggagcttccccgggagccagggggacttttgccgcagccatgaagggggcacgctggaggagggtcccctgggtgtccctgagctgcctgtgtctctgcctccttccgcatgtggtcccaggaaccacagaggacacattaataactggaagtaaaactcctgccccagtcacctcaacaggctcaacaacagcgacactagagggacaatcaactgcagcttcttcaaggacctctaatcaggacatatcagcttcatctcagaaccaccagactaagagcacggagaccaccagcaaagctcaaaccgacaccctcacgcagatgatgacatcaactcttttttcttccccaagtgtacacaatgtgatggagactgttacgcaggagacagctcctccagatgaaatgaccacatcatttccctccagtgtcaccaacacactcatgatgacatcaaagactataacaatgacaacctccacagactccactcttggaaacacagaagagacatcaacagcaggaactgaaagttctaccccagtgacctcagcagtctcaataacagctggacaggaaggacaatcacgaacaacttcctggaggacctctatccaagacacatcagcttcttctcagaaccactggactcggagcacgcagaccaccagggaatctcaaaccagcaccctaacacacagaaccacttcaactccttctttctctccaagtgtacacaatgtgacagggactgtttctcagaagacatctccttcaggtgaaacagctacctcatccctctgtagtgtcacaaacacatccatgatgacatcagagaagataacagtgacaacctccacaggctccactcttggaaacccaggggagacatcatcagtacctgttactggaagtcttatgccagtcacctcagcagccttagtaacagttgatccagaaggacaatcaccagcaactttctcaaggacttctactcaggacacaacagctttttctaagaaccaccagactcagagcgtggagaccaccagagtatctcaaatcaacaccctcaacaccctcacaccggttacaacatcaactgttttatcctcaccaagtggattcaacccaagtggaacagtttctcaggagacattcccttctggtgaaacaaccatctcatccccttccagtgtcagcaatacattcctggtaacatcaaaggtgttcagaatgccaatctccagagactctactcttggaaacacagaggagacatcactatctgtaagtggaaccatttctgcaatcacttccaaagtttcaaccatatggtggtcagacactctgtcaacagcactctcccccagttctctacctccaaaaatatccacagctttccacacccagcagagtgaaggtgcagagaccacaggacggcctcatgagaggagctcattctctccaggtgtgtctcaagaaatatttactctacatgaaacaacaacatggccttcctcattctccagcaaaggccacacaacttggtcacaaacagaactgccctcaacatcaacaggtgctgccactaggcttgtcacaggaaatccatctacaagggcagctggcactattccaagggtcccctctaaggtctcagcaataggggaaccaggagagcccaccacatactcctcccacagcacaactctcccaaaaacaacaggggcaggcgcccagacacaatggacacaagaaacggggaccactggagaggctcttctcagcagcccaagctatagtgtgattcagatgataaaaacggccacatccccatcttcttcacctatgctggatagacacacatcacaacaaattacaacggcaccatcaacaaatcattcaacaatacattccacaagcacctctcctcaggaatcaccagctgtttcccaaaggggtcacactcgagccccgcagaccacacaagaatcacaaaccacgaggtccgtctcccccatgactgacaccaagacagtcaccaccccaggttcttccttcacagccagtgggcactcgccctcagaaattgttcctcaggacgcacccaccataagtgcagcaacaacctttgccccagctcccaccgggaatggtcacacaacccaggccccgaccacagcactgcaggcagcacccagcagccatgatgccaccctggggccctcaggaggcacgtcactttccaaaacaggtgcccttactctggccaactctgtagtgtcaacaccagggggcccagaaggacaatggacatcagcctctgccagcacctcacctgacacagcagcagccatgacccatacccaccaggctgagagcacagaggcctctggacaaacacagaccagcgaaccggcctcctcagggtcacgaaccacctcagcgggcacagctaccccttcctcatccggggcgagtggcacaacaccttcaggaagcgaaggaatatccacctcaggagagacgacaaggttttcatcaaacccctccagggacagtcacacaacccagtcaacaaccgaattgctgtccgcctcagccagtcatggtgccatcccagtaagcacaggaatggcgtcttcgatcgtccccggcacctttcatcccaccctctctgaggcctccactgcagggagaccgacaggacagtcaagcccaacttctcccagtgcctctcctcaggagacagccgccatttcccggatggcccagactcagaggacaggaaccagcagagggtctgacactatcagcctggcgtcccaggcaaccgacaccttctcaacagtcccacccacacctccatcgatcacatccagtgggcttacatctccacaaacccagacccacactctgtcaccttcagggtctggtaaaaccttcaccacggccctcatcagcaacgccacccctcttcctgtcaccagcacctcctcagcctccacaggtcacgccacccctcttgctgtcagcagtgctacctcagcttccacagtatcctcggactcccctctgaagatggaaacatcaggaatgacaacaccgtcactgaagacagacggtgggagacgcacagccacatcaccaccccccacaacctcccagaccatcatttccaccattcccagcactgccatgcacacccgctccacagctgcccccatccccatcctgcctgagagaggtgaggccatacaggagtttccctcttcccctatggggcagacgccggggacctggagttcgtcaggaggaccgtggacttcacctccccactcttcaagccggcgactggcttcccccttggctcctctctccgtgattccctctacttcacagacaatggccagatcatcttcccagagtcagactaccagattttctcctaccccaacccactcccaacaggcttcacaggccgggaccctgtggccctggtggctccgttctgggacgatgctgacttctccactggtcgggggaccacattttatcaggaatacgagacgttctatggtgaacacagcctgctagtccagcaggccgagtcttggattagaaagatcacaaacaacgggggctacaaggccaggtgggccctaaaggtcacgtgggtcaatgcccacgcctatcctgcccagtggaccctcgggagcaacacctaccaagccatcctctccacggacgggagcaggtcctatgccctgtttctctaccagagcggtgggatgcagtgggacgtggcccagcgctcaggcaagccggtgctcatgggcttctctagtggagatggctttttcgaaaacagcccactgatgtcccagccagtgtgggagaggtatcgccctgatagattcctgaattccaactcaggcctccaagggctgcagttctacgggctacaccgggaagaaaggcccaactaccgtctcgagtgcctgcagtggctgaagagccagcctcggtggcccagctggggctggaaccaggtctcctgcccttgttcctggcagcagggacgacgggacttacgattccaacccgtcagcataggtcgctggggcctcggcagtaggcagctgtgcagcttcacctcttggcgaggaggcgtgtgctgcagctacgggccctggggagagtttcgtgaaggctggcacgtgcagcgtccttggcagttggcccaggaactggagccacagagctggtgctgccgctggaatgacaagccctacctctgtgccctgtaccagcagaggcggccccacgtgggctgtgctacatacaggcccccacagcccgcctggatgttcggggacccccacatcaccaccttggatggtgtcagttacaccttcaatgggctgggggacttcctgctggtcggggcccaagacgggaactcctccttcctgcttcagggccgcaccgcccagactggctcagcccaggccaccaacttcatcgcctttgcggctcagtaccgctccagcagcctgggccccgtcacggtccaatggctccttgagcctcacgacgcaatccgtgtcctgctggataaccagactgtgacatttcagcctgaccatgaagacggcggaggccaggagacgttcaacgccaccggagtcctcctgagccgcaacggctctgaggcctccgccagcttcgacggctgggccaccgtctcggtgatcgcgctctccaacatcctccactcctccgccagcctcccgcccgagtaccagaaccgcacggaggggctcctgggggtctggaataacaatccagaggacgacttcaggatgcccaatggctccaccattcccccagggagccctgaggagatgcttttccactttggaatgacctggcagatcaacgggacaggcctccttggcaagaggaatgaccagctgccttccaacttcacccctgttttctactcacaactgcaaaaaaacagctcctgggctgaacatttgatctccaactgtgacggagatagctcatgcatctatgacaccctggccctgcgcaacgcaagcatcggacttcacacgagggaagtcagtaaaaactacgagcaggcgaacgccaccctcaatcagtacccgccctccatcaatggtggtcgtgtgattgaagcctacaaggggcagaccacgctgattcagtacaccagcaatgctgaggatgccaacttcacgctcagagacagctgcaccgacttggagctctttgagaatgggacgttgctgtggacacccaagtcgctggagccattcactctggagattctagcaagaagtgccaagattggcttggcatctgcactccagcccaggactgtggtctgccattgcaatgcagagagccagtgtttgtacaatcagaccagcagggtgggcaactcctccctggaggtggctggctgcaagtgtgacgggggcaccttcggccgctactgcgagggctccgaggatgcctgtgaggagccgtgcttcccgagtgtccactgcgttcctgggaagggctgcgaggcctgccctccaaacctgactggggatgggcggcactgtgcggctctggggagctctttcctgtgtcagaaccagtcctgccctgtgaattactgctacaatcaaggccactgctacatctcccagactctgggctgtcagcccatgtgcacctgccccccagccttcactgacagccgctgcttcctggctgggaacaacttcagtccaactgtcaacctagaacttcccttaagagtcatccagctcttgctcagtgaagaggaaaatgcctccatggcagaggtcaacgcctcggtggcatacagactggggaccctggacatgcgggcctttctccgcaacagccaagtggaacgaatcgattctgcagcaccggcctcgggaagccccatccaacactggatggtcatctcggagttccagtaccgccctcggggcccggtcattgacttcctgaacaaccagctgctggccgcggtggtggaggcgttcttataccacgttccacggaggagtgaggagcccaggaacgacgtggtcttccagcccatttccggggaagacgtgcgcgatgtgacagccctgaacgtgagcacgctgaaggcttacttcagatgcgatggctacaagggctacgacctggtctacagcccccagagcggcttcacctgcgtgtccccgtgcagtaggggctactgtgaccatggaggccagtgccagcacctgcccagtgggccccgctgcagctgtgtgtccttctccatctacacggcctggggcgagcactgtgagcacctgagcatgaaactcgacgcgttcttcggcatcttctttggggccctgggcggcctcttgctgctgggggtcgggacgttcgtggtcctgcgcttctggggttgctccggggccaggttctcctatttcctgaactcagctgaggccttgccttgaaggggcagctgtggcctaggctacctcaagactcacctcatccttaccgcacatttaaggcgccattgcttttgggagactggaaaagggaaggtgactgaaggctgtcaggattctt

SEQ ID NO: 102 - DNA, 6840 bp, Homo sapiens
  misc_feature (651)..(651): n is a, c, g, or t
  misc_feature (814)..(814): n is a, c, g, or t
  misc_feature (819)..(819): n is a, c, g, or t
  misc_feature (2038)..(2038): n is a, c, g, or t
  misc_feature (2096)..(2096): n is a, c, g, or t
  misc_feature (2100)..(2100): n is a, c, g, or t
  misc_feature (2857)..(2857): n is a, c, g, or t
  misc_feature (2958)..(2958): n is a, c, g, or t
  misc_feature (2993)..(2993): n is a, c, g, or t
tttttttttttttttttggagacacaaaaagtcagagagactttatttaaatagagttaatttgaagtaaaccagagagttttgtgtgcagaagcattttgcttaacttagggccatcaccacattatgaactcgtgtgtgtgtgtgtgtgtgtgcacgcgcgccaggctagtgtccttctgtgggtgtgtctgcgtgaggacccatccatgcatgtttgatctttatggcctccccctgtgcacctgcgcctatggataaggtatagtcctgtcttgattcccagtattcattctccttgaagaatcctgacagccttcagtcaccttcccttttccagtctcccaaaagcaatggcgccttaaatgtgcggtaaggatgaggtgagtcttgaggtagcctaggccacagctgccccttcaaggcaaggcctcagctgagttcaggaaataggagaacctggccccggagcaaccccagaagcgcaggaccacgaacgtcccgacccccagcagcaagaggccgcccagggccccaaagaagatgccgaagaacgcgtcgagtttcatgctcaggtgctcacagtgctcgccccaggccgtgtagatggagaaggacacacagctgcagcggggcccactgggcaggtgntggcactggcctccatggtcacagtagcccctactgcacggggacacgcaggtgaagccgctctgggggctgtagaccaggtcgtagcccttgtagccatcgcatctgaagtaagccttcagcgtgctcacgttcagggctgtcacatcgcgcacgtcttccncgganatgggctggaagaccacgtcgttcctgggctcctcactcctccgtggaacgtggtataagaacgcctccaccaccgcggccagcagctggttgttcaggaagtcaatgaccgggccccgagggcggtactggaactccgagatgaccatccagtgttggatggggcttcccgaggccggtgctgcagaatcgattcgttccacttggctgttgcggagaaaggcccgcatgtccagggtccccagtctgtatgccaccgaggcgttgacctctgccatggaggcattttcctcttcactgagcaagagctggatgactcttaagggaagttctaggttgacagttggactgaagttgttcccagccaggaagcagcggctgtcagtgaaggctggggggcaggtgcacatgggctgacagcccagagtctgggagatgtagcagtggccttgattgtagcagtaattcacagggcaggactggttctgacacaggaaagagctccccagagctccagggaggagttgcccaccctgctggtctgattgtacaaacactggctctctgcattgcaatggcagaccacagtcctgggctggagtgcagatgccaagccaatcttggcacttcttgctagaatctccagagtgaatggctccagcgacttgggtgtccacagcaacgtcccattctcaaagagctccaagtcggtgcagctgtctctgagcgtgaagttggcatcctcagcattgctggtgtactgaatcagcgtggtctgccccttgtaggcttcaatcacacgaccaccattgatggagggcgggtactgattgagggtggcgttcgcctgctcgtagtttttactgacttccctcgtgtgaagtccgatgcttgcgttgcgcagggccagggtgtcatagatgcatgagctatctccgtcacagttggagatcaaatgttcagcccaggagctgtttttttgcagttgtgagtagaaaacaggggtgaagttggaaggcagctggtcattcctcttgccaaggaggcctgtcccgttgatctgccaggtcattccaaagtggaaaagcatctcctcagggctccctgggggaatggtggagccattgggcatcctgaagtcgtcctctggattgttattccagacccccaggagcccctccgtgcggttctggtactcgggcgggaggctggcggaggngtggaggatgttggagagcgcgatcaccgagacggtggcccagccgtcgaagctggcngagncctcagagccgttgcggctcaggaggactccggtggcgttgaacgtctcctggcctccgccgtcttcatggtcaggctgaaatgtcacagtctggttatccagcaggacacggattgcgtcgtgaggctcaaggagccattggaccgtgacggggcccaggctgctggagcggtactgagccgcaaaggcgatgaagttggtggcctgggctgagccagtctgggcggtgcggccctgaagcaggaaggaggagttcccgtcttgggccccgaccagcaggaagtcccccagcccattgaaggtgtaactgacaccatccaaggtggtgatgtgggggtccccgaacatccaggcgggctgtgggggcctgtatgtagcacagcccacgtggggccgcctctgctggtacagggcacagaggtagggcttgtcattccagcggcagcaccagctctgtggctccagttcctgggccaactgccaaggacgctgcacgtgccagccttcacgaaactctccccagggcccgtagctgcagcacacgcctcctcgccaagaggtgaagctgcacagctgcctactgccgaggccccagcgacctatgctgacgggttggaatcgtaagtcccgtcgtccctgctgccaggaacaagggcaggagacctggttccagccccagctgggccaccgaggctggctcttcagccactgcaggcactcgagacggtagttgggcctttcttcccggtgtagccngtagaactgcagcccttggaggcctgagttggaattcaggaatctatcagggcgatacctctcccacactggctgggacatcagtgggctgttttcgaaanagccatctccactagagaagcccatgagcaccggnttgcctgagcgctgggccacgtcccactgcatcccaccgctctggtagagaaacagggcataggacctgctcccgtccgtggagaggatggcttggtaggtgttgctcccgagggtccactgggcaggataggcgtgggcattgacccacgtgacctttagggcccacctggccttgtagcccccgttgtttgtgatctttctaatccaagactcggcctgctggactagcaggctgtgttcaccatagaacgtctcgtattcctgataaaatgtggtcccccgaccagtggagaagtcagcatcgtcccagaacggagccaccagggccacagggtcccggcctgtgaagcctgttgggagtgggttggggtaggagaaaatctggtagtctgactctgggaagatgatctggccattgtctgtgaagtagagggaatcacggagagaggagccaagggggaagccagtcgccggcttgaagagtggggaggtgaagtccacggtcctcctgacgaactccaggtccccggcgtctgccccataggggaagagggaaactcctctctcaggcaggatggggatgggggcagctgtggagcgggtgtgcatggcagtgctgggaatggtggaaatgatggtctgggaggttgtggggggtggtgatgtggctgtgcgtctcccaccgtctgtcttcagtgacggtgttgtcattcctgatgtttccatcttcagaggggagtccgaggatactgtggaagctgaggtagcactgctgacagcaagaggggtggcgtgacctgtggaggctgaggaggtgctggtgacaggaagaggggtggcgttgctgatgagggccgtggtgaaggttttaccagaccctgaaggtgacagagtgtgggtctgggtttgtggagatgtaagcccactggatgtgatcgatggaggtgtgggtgggactgttgagaaggtgtcggttgcctgggacgccaggctgatagtgtcagaccctctgctggttcctgtcctctgagtctgggccatccgggaaatggcggctgtctcctgaggagaggcactgggagaagttgggcttgactgtcctgtcggtctccctgcagtggaggcctcagagagggtgggatgaaaggtgccggggacgatcgaagacgccattcctgtgcttactgggatggcaccatgactggctgaggcggacagcaattcggttgttgactgggttgtgtgactgtccctggaggggtttgatgaaaaccttgtcgtctctcctgaggtggatattccttcgcttcctgaaggtgttgtgccactcgccccggatgaggaaggggtagctgtgcccgctgaggtggttcgtgaccctgaggaggccggttcgctggtctgtgtttgtccagaggcctctgtgctctcagcctggtgggtatgggtcatggctgctgctgtgtcaggtgaggtgctggcagaggctgatgtccattgtccttctgggccccctggtgttgacactacagagttggccagagtaagggcacctgttttggaaagtgacgtgcctcctgagggccccagggtggcatcatggctgctgggtgctgcctgcagtgctgtggtcggggcctgggttgtgtgaccattcccggtgggagctggggcaaaggttgttgctgcacttatggtgggtgcgtcctgaggaacaatttctgagggcgagtgcccactggctgtgaaggaagaacctggggtggtgactgtcttggtgtcagtcatgggggagacggacctcgtggtttgtgattcttgtgtggtctgcggggctcgagtgtgacccctttgggaaacagctggtgattcctgaggagaggtgcttgtggaatgtattgttgaatgatttgttgatggtgccgttgtaatttgttgtgatgtgtgtctatccagcataggtgaagaagatggggatgtggccgtttttatcatctgaatcacactatagcttgggctgctgagaagagcctctccagtggtccccgtttcttgtgtccattgtgtctgggcgcctgcccctgttgtttttgggagagttgtgctgtgggaggagtatgtggtgggctctcctggttcccctattgctgagaccttagaggggacccttggaatagtgccagctgcccttgtagatggatttcctgtgacaagcctagtggcagcacctgttgatgttgagggcagttctgtttgtgaccaagttgtgtggcctttgctggagaatgaggaaggccatgttgttgtttcatgtagagtaaatatttcttgagacacacctggagagaatgagctcctctcatgaggccgtcctgtggtctctgcaccttcactctgctgggtgtggaaagctgtggatatttttggaggtagagaactgggggagagtgctgttgacagagtgtctgaccaccatatggttgaaactttggaagtgattgcagaaatggttccacttacagatagtgatgtctcctctgtgtttccaagagtagagtctctggagattggcattctgaacacctttgatgttaccaggaatgtattgctgacactggaaggggatgagatggttgtttcaccagaagggaatgtctcctgagaaactgttccacttgggttgaatccacttggtgaggataaaacagttgatgttgtaaccggtgtgagggtgttgagggtgttgatttgagatactctggtggtctccacgctctgagtctggtggttcttagaaaaagctgttgtgtcctgagtagaagtccttgagaaagttgctggtgattgtccttctggatcaactgttactaaggctgctgaggtgactggcataagacttccagtaacaggtactgatgatgtctcccctgggtttccaagagtggagcctgtggaggttgtcactgttatcttctctgatgtcatcatggatgtgtttgtgacactacagagggatgaggtagctgtttcacctgaaggagatgtcttctgagaaacagtccctgtcacattgtgtacacttggagagaaagaaggagttgaagtggttctgtgtgttagggtgctggtttgagattccctggtggtctgcgtgctccgagtccagtggttctgagaagaagctgatgtgtcttggatagaggtcctccaggaagttgttcgtgattgtccttcctgtccagctgttattgagactgctgaggtcactggggtagaactttcagttcctgctgttgatgtctcttctgtgtttccaagagtggagtctgtggaggttgtcattgttatagtctttgatgtcatcatgagtgtgttggtgacactggagggaaatgatgtggtcatttcatctggaggagctgtctcctgcgtaacagtctccatcacattgtgtacacttggggaagaaaaaagagttgatgtcatcatctgcgtgagggtgtcggtttgagctttgctggtggtctccgtgctcttagtctggtggttctgagatgaagctgatatgtcctgattagaggtccttgaagaagctgcagttgattgtccctctagtgtcgctgttgttgagcctgttgaggtgactggggcaggagttttacttccagttattaatgtgtcctctgtggttcctgggaccacatgcggaaggaggcagagacacaggcagctcagggacacccaggggaccctcctccagcgtgcccccttcatggctgcggcaaaagtccccctggctcccggggaagctccacggcccagcagctgcagtgtgaggagcagac

SEQ ID NO: 103 - DNA, 6840 bp, Homo sapiens; identical to SEQ ID NO: 102
  misc_feature (651)..(651): n is a, c, g, or t
  misc_feature (814)..(814): n is a, c, g, or t
  misc_feature (819)..(819): n is a, c, g, or t
  misc_feature (2038)..(2038): n is a, c, g, or t
  misc_feature (2096)..(2096): n is a, c, g, or t
  misc_feature (2100)..(2100): n is a, c, g, or t
  misc_feature (2857)..(2857): n is a, c, g, or t
  misc_feature (2958)..(2958): n is a, c, g, or t
  misc_feature (2993)..(2993): n is a, c, g, or t

SEQ ID NO: 104 - DNA, 3266 bp, Homo sapiens
  misc_feature (28)..(28): n is a, c, g, or t
  misc_feature (52)..(52): n is a, c, g, or t
  misc_feature (157)..(157): n is a, c, g, or t
  misc_feature (369)..(369): n is a, c, g, or t
  misc_feature (372)..(372): n is a, c, g, or t
  misc_feature (378)..(378): n is a, c, g, or t
  misc_feature (386)..(386): n is a, c, g, or t
  misc_feature (392)..(392): n is a, c, g, or t
  misc_feature (406)..(406): n is a, c, g, or t
  misc_feature (432)..(432): n is a, c, g, or t
  misc_feature (448)..(448): n is a, c, g, or t
  misc_feature (451)..(451): n is a, c, g, or t
  misc_feature (467)..(467): n is a, c, g, or t
  misc_feature (503)..(503): n is a, c, g, or t
  misc_feature (507)..(507): n is a, c, g, or t
  misc_feature (519)..(519): n is a, c, g, or t
  misc_feature (569)..(570): n is a, c, g, or t
  misc_feature (625)..(625): n is a, c, g, or t
  misc_feature (630)..(630): n is a, c, g, or t
  misc_feature (659)..(659): n is a, c, g, or t
  misc_feature (661)..(661): n is a, c, g, or t
  misc_feature (697)..(697): n is a, c, g, or t
  misc_feature (708)..(708): n is a, c, g, or t
  misc_feature (715)..(715): n is a, c, g, or t
  misc_feature (722)..(722): n is a, c, g, or t
  misc_feature (735)..(735): n is a, c, g, or t
  misc_feature (747)..(747): n is a, c, g, or t
  misc_feature (751)..(751): n is a, c, g, or t
  misc_feature (754)..(754): n is a, c, g, or t
  misc_feature (770)..(770): n is a, c, g, or t
  misc_feature (775)..(775): n is a, c, g, or t
  misc_feature (798)..(798): n is a, c, g, or t
  misc_feature (828)..(828): n is a, c, g, or t
  misc_feature (853)..(853): n is a, c, g, or t
  misc_feature (858)..(858): n is a, c, g, or t
  misc_feature (1189)..(1189): n is a, c, g, or t
  misc_feature (1207)..(1207): n is a, c, g, or t
  misc_feature (1773)..(1773): n is a, c, g, or t
  misc_feature (2042)..(2042): n is a, c, g, or t
  misc_feature (2522)..(2569): n is a, c, g, or t
cccctttcccaaaaaacataaaccctcntaacccccaagcacctaaaaggcntataatttacattaactacagtttgacttttcacataacagcgagaaggaccttacaaatcctcagtaaatcttcaattaatatttagagaacaacagatacgcnaaacaggttttatgtgtaagctaccttagacggccataataaaattatgagcaaagataatggcatttcaacagattgctttaatgttaaacctcacaatgaaggatacttgctcaataaaataatgcactttagtgtaatgaaaagtttaatacatacaaataatactgaaaaaaattcctagtgactggctagctggtaatatgctactncanaaattncctttcanaacctnaaggacctagattnctttattatttgtttacactatcaangaagaatattttgccnacnaaatgaataatggacnaagaggccattgacatgtatacttttaaaaatattnactnaaaaaatagttnaaagtaaaaaattttattttaaaagtaaggaaaaagctaaactggttatnnttgagattttaattgttatactttgtgaatgagggggagttaagcgcttgaaacnatttnatattatttacacttaagagtatgaaaancngtgtgagactacatctggctatgttattataattcnagaggaaatcnattatcnagtcacnaccccttgtagcnaataaaatatancaangcnaaaaaaaaaaagcaanccaantagaatccctcagccaacacaancttagtctattcttaggggttgccatgatngtttctgattaatggtaacatattnccacnagtgcaaataaaacatcagaaataaaatatctttttcactgaataagaaagctgttatttgtgtgatcttagtaaaactctgaaaggaatttgtaaaactcattcataatttaatcaaatgccttagtttttttttttacccccttggtataaaagtttacagatgagtttcatatttcatcacagttatatggtctagtgcatttcagagtatttggacattatcaaagctgtcctttcccaatgaaaacatttaagaaaacgttaagcacttctcaagtaacatgatgtggaattacactttttgctcttacctcttttaggtacacangtattattcaacaaagcnaaactattttacagtgtctgttaacaaaaagttctctattagatagaggaaactacagtatcctgaagctatttccccaagagctagtttagtagatagacctttgggcccatcttatttttccttcttttttttttttcagtaaggtaactttccattatgcacatactataccatcatcattcattgggtggagattagctgggaagtagctgtatatttttagtgagatcactgatggcaatggatctctggatcgtgctgctgcttatggttaaatcatatctaatgtgaaatttcgaattacatccagagctccagtatcaaagccgcacatatccaacatgcctctatcatctgggtctgcaatggtgaaaccatttgatgtcattccacaaacaatcaatttagctggaatatccattttctttcgatactccctcagagcaatagcaggatggacacctccagcaaaggtctcattatcagtgaatacaatgaagacatcagcaggtgtgtttgtcttctgagcccagatcattggaagagagcaatcagttccaccntgctgggatctgactcatagccattaaaacctgttgtaaggtcatatctgtagtcactggacatggtaccatttcatcggaaaaagcaactacataagaatctttttctgttcgtgtgacaaccatgcacattgctgcagcaactgtactagcgttgagtatactacccaaaactctttggttcatagaagcactgacatcaacagctagtaagaaacgttttccagttggttcaactgtcttaaatgttttataaaaagcagcatccnatgctttcaaaatttcttcatcagggcgccacttcagtttccctctgagaccatgacctgtcttgtaagtttctaatgcgatcaaaatatgaaatggatgtatacgagccttttttaatagtttttcattacacagtttttcacatactaaagatacttctgaatttcctggttcaagtactgaattagcagtcatctttcctagattccttagtaatgcagtaagcggcatttcttgtaacaaagccttccatacctctttagactttaagtgatttgttaaaagatgttctctaactaatctatgttcttctattagatgaatgacttctagctcatctcttgtgcgcttcactttctctacagcctccagatactttaataatttttcagtctccacagagagtgctttttctttatacaattcatgaacttctttccagccctttgtaatatatttggtcacaattgcaagtcctnnnnnnnnnnnnnnnnnnnnnnnnnnnnnnnnnnnnnnnnnnnnnnnngtacctggcagccgaccccctggatccgcagcgccgccaggagaagtcctgcgcagcgctgggaaacgacaaaagaaggcagcctgacgggcagcgacagccacagcaacagcaacagccccactgccgccggggattccaatttcatccatgtcaacagccaagccaacacgctgttgctccaatacgtaaaaggcacttctgtagggctggcatgagtcagtcagtccaagataaactgaaggagttgaataacatctatccagtgagtcctgcaagacttcaggctctttctcagccagcagctccctgctgagcctgggacctgttgcctcttggtcctcctttttcacttgatcccaccgatgtcctttcaggaggaattgagagagtcgaataaccttcatcccaggactcctgggggacttcctcctcttcagactcctgcagattcctgggagacactggccctttttcttcctcttcctcatcatcactttcattttctgggataatgtgtacagcatcctcccattcaacatgagaggatgagccaatgagagttgagtcgactttgtcttcctcaaatgtgattttggttttcctatgtggctggttggagtcataagggccatggctatttgaacaagtgatggcacactcctccagtgagtcctcagggacttccttttcttca

SEQ ID NO: 105 - DNA, 1529 bp, Homo sapiens
agtggctctactttcagaagaaagtgtctctcttcctgcttaaacctctgtctctgacggtccctgccaatcgctctggtcgaccccaacacactaggaggacagacacaggctccaaactccactaaccagagctgtgattgtgcccgctgagtggactgcgttgtcagggagtgagtgctccatcatcgggagaatccaagcaggaccgccatggaggaaggtcaatattcagagatcgaggagcttcccaggaggcggtgttgcaggcgtgggactcagatcgtgctgctggggctggtgaccgccgctctgtgggctgggctgctgactctgcttctcctgtggcactgggacaccacacagagtctaaaacagctggaagagagggctgcccggaacgtctctcaagtttccaagaacttggaaagccaccacggtgaccagatggcgcagaaatcccagtccacgcagatttcacaggaactggaggaacttcgagctgaacagcagagattgaaatctcaggacttggagctgtcctggaacctgaacgggcttcaagcagatctgagcagcttcaagtcccaggaattgaacgagaggaacgaagcttcagatttgctggaaagactccgggaggaggtgacaaagctaaggatggagttgcaggtgtccagcggctttgtgtgcaacacgtgccctgaaaagtggatcaacttccaacggaagtgctactacttcggcaagggcaccaagcagtgggtccacgcccggtatgcctgtgacgacatggaagggcagctggtcagcatccacagcccggaggagcaggacttcctgaccaagcatgccagccacaccggctcctggattggccttcggaacttggacctgaagggagagtttatctgggtggatgggagccatgtggactacagcaactgggctccaggggagcccaccagccggagccagggcgaggactgcgtgatgatgcggggctccggtcgctggaccgacgccttctgcgaccgtaagctgggcgcctgggtgtgcgaccggctggccacatgcacgccgccagccagcgaaggttccgcggagtccatgggacctgattcaagaccagaccctgacggccgcctgcccaccccctctgcccctctccactcttgagcatggatacagccaggcccagagcaagaccctgaagacccccaaccacggcctaaaagcctctttgtggctgaaaggtccctgtgacattttctgccacccaaacggaggcagctgacacatctcccgctcctctatggcccctgccttcccaggagtacaccccaacagcaccctctccagatgggagtgcccccaacagcaccctctccagatgagagttacaccccaacagcaccctctccagatgcagccccatctcctcagcaccccaggacctgagtatccccagctcagggtggtgagtcctcctgtccagcctgcatcaataaaatggggcagtgatggcc

SEQ ID NO: 106 - DNA, 1529 bp, Homo sapiens; identical to SEQ ID NO: 105

SEQ ID NO: 107 - DNA, 3443 bp, Homo sapiens
agtcaggggtcacggcggcgtaggctgtggcgggaaacgctgtttgaagcgggatggatggcaagcggcggccaggcccagggcccggggtgcccccaaagcgggcccgtgggggcctctgggatgatgatgatgcaccttggccatcccaattcgaggaggacctggcactgatggaggagatggaggcagaacacaggctgcaggagcaggaggaggaggagctgcagtcagtcctggagggggttgcagacgggcaggtcccaccatcagccatagatcctcgctggcttcggcccacaccaccagcgctggacccccagacagagcccctcatcttccaacagttggagattgaccattatgtgggcccagcgcagcctgtgcctggggggcccccaccatcccgcggctccgtgcctgtgctccgcgccttcggggtcaccgatgaggggttctctgtctgctgccacatccacggcttcgctccctacttctacaccccagcgccccctggtttcgggcccgagcacatgggtgacctgcaacgggagctgaacttggccatcagccgggacagtcgcggggggagggagctgactgggccggccgtgctggctgtggaactgtgctcccgagagagcatgtttgggtaccacgggcacggcccctccccgttcctgcgcatcaccgtggcgctgccgcgcctcgtggccccggcccgccgtctcctggaacagggcatccgtgtggcaggcctgggcacgcccagcttcgcgccctacgaggccaacgtcgactttgagatccggttcatggtggacacggacatcgtcggctgcaactggctggagctcccagctgggaaatacgccctgaggctgaaggagaaggctacgcagtgccagctggaggcggacgtgctgtggtctgacgtggtcagtcacccaccggaagggccatggcagcgcattgcgcccttgcgcgtgctcagcttcgatatcgagtgcgccggccgcaaaggcatcttccctgagcctgagcgggaccctgtcatccagatctgctcgctgggcctgcgctggggggagccggagcccttcctacgcctggcgctcaccctgcggccctgtgcccccatcctgggtgccaaggtgcagagctacgagaaggaggaggacctgctgcaggcctggtccaccttcatccgtatcatggaccccgacgtgatcaccggttacaacatccagaacttcgaccttccgtacctcatctctcgggcccagaccctcaaggtacaaacattccctttcctgggccgtgtggccggcctttgctccaacatccgggactcttcattccagtccaagcagacgggccggcgggacaccaaggttgtcagcatggtgggccgcgtgcagatggacatgctgcaggtgctgctgcgggagtacaagctccgctcccacacgctcaatgccgtgagcttccacttcctgggcgagcagaaggaggacgtgcagcacagcatcatcaccgacctgcagaatgggaacgaccagacccgccgccgcctggctgtgtactgcctgaaggatgcctacctgccactgcggctgctggagcggctcatggtgctggtgaacgccgtggagatggcgagggtcactggcgtgcccctcagctacctgctcagtcgtggccagcaggtcaaagtcgtatcccagctgttgcggcaggccatgcacgaggggctgctgatgcccgtggtgaagtcagagggcggcgaggactacacgggagccactgtcatcgagcccctcaaagggtactacgacgtccccatcgccaccctggacttctcctcgctgtacccgtccatcatgatggcccacaacctgtgttacaccacgctccttcggcccgggactgcacagaaactgggcctgactgaggatcagttcatcaggacccccaccggggacgagtttgtgaagacctcagtgcggaaggggctgctgccccagatcctggagaacctgctcagtgcccggaagagggccaaggccgagctggccaaggagacagaccccctccggcgccaggtcctggatggacggcagctggcgctgaaggtgagcgccaactccgtatacggcttcactggcgcccaggtgggcaagttgccgtgcctggagatctcacagagcgtcacggggttcggacgtcagatgatcgagaaaaccaagcagctggtggagtctaagtacacagtggagaatggctacagcaccagtgccaaggtggtgtatggtgacactgactccgtcatgtgccgattcggcgtgtcctcggtggctgaggcgatggccctggggcgggaggccgcggactgggtgtcaggtcacttcccgtcgcccatccggctggagtttgagaaggtctacttcccatacctgcttatcagcaagaagcgctacgcgggcctgctcttctcctcccggcccgacgcccacgaccgcatggactgcaagggcctggaggccgtgcgcagggacaactgccccctcgtggccaacctggtcactgcctcactgcgccgcctgctcatcgaccgagaccctgagggcgcggtggctcacgcacaggacgtcatctcggacctgctgtgcaaccgcatcgatatctcccagctggtcatcaccaaggagctgacccgcgcggcctccgactatgccggcaagcaggcccacgtggagctggccgagaggatgaggaagcgggaccccgggagtgcgcccagcctgggcgaccgcgtcccctacgtgatcatcagtgccgccaagggtgtggccgcctacatgaagtcggaggacccgctgttcgtgctggagcacagcctgcccattgacacgcagtactacctggagcagcagctggccaagcccctcctgcgcatcttcgagcccatcctgggcgagggccgtgccgaggctgtgctactgcggggggaccacacgcgctgcaagacggtgctcacgggcaaggtgggcggcctcctggccttcgccaaacgccgcaactgctgcattggctgccgcacagtgctcagccaccagggagccgtgtgtgagttctgccagccccgggagtctgagctgtatcagaaggaggtatcccatctgaatgccctggaggagcgcttctcgcgcctctggacgcagtgccagcgctgccagggcagcctgcacgaggacgtcatctgcaccagccgggactgccccatcttctacatgcgcaagaaggtgcggaaggacctggaagaccaggagcagctcctgcggcgcttcggaccccctggacctgaggcctggtgaccttgcaagcatcccatggggcgggggcgggaccagggagaattaataaagttctggacttttgct

SEQ ID NO: 108 - DNA, 9662 bp, Homo sapiens
gagcccggcccgggggacgggcggcgggatagcgggaccccggcgcggcggtgcgcttcagggcgcagcggcggccgcagaccgagccccgggcgcggcaagaggcggcgggagccggtggcggctcggcatcatgcgtcgagggcgtctgctggagatcgccctgggatttaccgtgcttttagcgtcctacacgagccatggggcggacgccaatttggaggctgggaacgtgaaggaaaccagagccagtcgggccaagagaagaggcggtggaggacacgacgcgcttaaaggacccaatgtctgtggatcacgttataatgcttactgttgccctggatggaaaaccttacctggcggaaatcagtgtattgtccccatttgccggcattcctgtggggatggattttgttcgaggccaaatatgtgcacttgcccatctggtcagatagctccttcctgtggctccagatccatacaacactgcaatattcgctgtatgaatggaggtagctgcagtgacgatcactgtctatgccagaaaggatacatagggactcactgtggacaacctgtttgtgaaagtggctgtctcaatggaggaaggtgtgtggccccaaatcgatgtgcatgcacttacggatttactggaccccagtgtgaaagagattacaggacaggcccatgttttactgtgatcagcaaccagatgtgccagggacaactcagcgggattgtctgcacaaaacagctctgctgtgccacagtcggccgagcctggggccacccctgtgagatgtgtcctgcccagcctcacccctgccgccgtggcttcattccaaatatccgcacgggagcttgtcaagatgtggatgaatgccaggccatccccgggctctgtcagggaggaaattgcattaatactgttgggtcttttgagtgcaaatgccctgctggacacaaacttaatgaagtgtcacaaaaatgtgaagatattgatgaatgcagcaccattcctggaatctgtgaagggggtgaatgtacaaacacagtcagcagttacttttgcaaatgtccccctggtttttacacctctccagatggtaccagatgcatagatgttcgcccaggatactgttacacagctctgacaaacgggcgctgctctaaccagctgccacagtccataaccaaaatgcagtgctgctgtgatgccggccgatgctggtctccaggggtcactgtcgcccctgagatgtgtcccatcagagcaaccgaggatttcaacaagctgtgctctgttcctatggtaattcctgggagaccagaatatcctcccccaccccttggccccattcctccagttctccctgttcctcctggctttcctcctggacctcaaattccggtccctcgaccaccagtggaatatctgtatccatctcgggagccaccaagggtgctgccagtaaacgttactgattactgccagttggtccgctatctctgtcaaaatggacgctgcattccaactcctgggagttaccggtgtgagtgcaacaaagggttccagctggacctccgtggggagtgtattgatgttgatgaatgtgagaaaaacccctgtgctggtggtgagtgtattaacaaccagggttcgtacacctgtcagtgccgagctggatatcagagcacactcacgcggacagaatgccgagacattgatgagtgtttacagaatggccggatctgcaataatggacgctgcatcaacacagatggcagttttcattgcgtgtgtaatgcgggctttcatgttacacgagatgggaagaactgtgaagatatggatgaatgcagcataaggaacatgtgccttaatggaatgtgtatcaatgaagatggcagttttaaatgtatttgcaaacctggattccagctggcatcagatggacgttattgcaaagacattaacgagtgtgaaacccctgggatctgcatgaatgggcgttgcgtcaacactgatggctcctacagatgtgaatgcttccctggactggctgtgggtctggatggccgtgtgtgtgttgacacacacatgcggagcacatgctatggtggatacaagagaggccagtgtatcaaacctttgtttggtgctgtcactaaatctgaatgctgttgcgccagcactgagtatgcatttggggaaccttgccagccgtgtcctgcacagaattcagcggaatatcaggcactctgcagcagtgggccaggaatgacgtcagcaggcagtgatataaatgaatgtgcactagatcctgatatttgcccaaatggaatctgtgaaaaccttcgtgggacctataaatgtatatgcaattcaggatatgaagtggattcaactgggaaaaactgcgttgatattaatgaatgtgtactgaacagtctcctttgtgacaatggacaatgtagaaatactcctggaagttttgtctgtacctgccccaagggatttatctacaaacctgatctaaaaacatgtgaagacattgatgaatgcgaatcaagtccttgcattaatggagtctgcaagaacagcccaggctcttttatttgtgaatgttcttctgaaagtactttggatccaacaaaaaccatctgcatagaaaccatcaagggcacttgctggcagactgtcattgatgggcgatgtgagatcaacatcaatggagccaccttaaagtcccagtgctgctcctccctcggtgctgcgtggggaagcccgtgcaccctatgccaagttgatcccatatgtggtaaagggtactcaagaattaaaggaacacaatgtgaagatatagatgaatgtgaagtgttcccaggagtgtgtaaaaatggcctgtgtgttaacactagggggtcattcaagtgtcagtgtcccagtggaatgactttggatgccacaggaaggatctgtcttgatatccgcctggaaacctgcttcctgaggtacgaggacgaggagtgcaccctgcctattgctggccgccaccgcatggacgcctgctgctgctccgtcggggcagcctggggtactgaggaatgcgaggagtgtcccatgagaaatactcctgagtacgaggagctgtgtccgagaggacccggatttgccacaaaagaaattacaaatggaaagcctttcttcaaagatatcaatgagtgcaagatgatacccagcctctgcacccacggcaagtgcagaaacaccattggcagctttaagtgcaggtgtgacagcggctttgctcttgattctgaagaaaggaactgcacagacattgacgaatgccgcatatctcctgacctctgtggcagaggccagtgtgtgaacacccctggggactttgaatgcaagtgtgacgaaggctatgaaagtggattcatgatgatgaagaactgcatggatattgatgagtgtcagagagatcctctcctatgccgaggtggtgtttgccataacacagagggaagttaccgctgtgaatgcccgcctggccatcagctgtcccccaacatctccgcgtgtatcgacatcaatgaatgtgagctgagtgcacacctgtgccccaatggccgttgcgtgaacctcatagggaagtatcagtgtgcctgcaaccctggctaccattcaactcccgataggctattttgtgttgacattgatgaatgcagcataatgaatggtggttgtgaaaccttctgcacaaactctgaaggcagctatgaatgtagctgtcagccgggatttgcactaatgcctgaccagagatcatgcaccgacatcgatgagtgtgaagataatcccaatatctgtgatggtggtcagtgcacaaatatccctggagagtacaggtgcttgtgttatgatggattcatggcatctgaagacatgaagacttgtgtagatgtcaatgagtgtgacctgaatccaaatatctgcctaagtgggacctgtgaaaacacgaaaggctcatttatctgccactgtgatatgggctactccggcaaaaaaggaaaaactggctgtacagacatcaatgaatgtgaaattggagcacacaactgtggcaaacatgctgtatgtaccaatacagcaggaagcttcaaatgtagctgcagtcccgggtggattggagatggcattaagtgcactgatctggacgaatgttccaatggaacccatatgtgcagccagcatgcagactgcaagaataccatgggatcttaccgctgtctgtgcaaggaaggatacacaggtgatggcttcacttgtacagaccttgatgagtgctctgagaacctgaatctctgtggcaatggccagtgcctcaatgcaccaggaggataccgctgtgaatgcgacatgggcttcgtgcccagtgctgacgggaaagcctgtgaagatattgatgagtgctcccttccgaacatctgtgtctttggaacttgccacaacctccctggcctgttccgctgtgagtgtgagataggctacgaactggacagaagcggcgggaactgcacagatgtgaatgaatgcctggatccaaccacgtgcatcagtgggaactgtgtcaacactccaggcagctatatctgtgactgcccacctgattttgaactgaacccaactcgagttggctgtgttgatacccgctctggaaattgctatttggatattcgacctcgaggagacaatggagatacagcctgcagcaatgaaattggagttggtgtttccaaagcttcctgctgctgttctctgggtaaagcctggggtactccttgtgagatgtgtcctgctgtgaacacatccgagtacaaaattctttgtcctggaggggaaggtttccgaccaaatcctatcaccgttatattggaagatattgatgagtgccaggagctaccagggctgtgccaaggaggaaaatgtatcaacacctttgggagtttccagtgccgctgtccaaccggctactacctgaatgaagatacacgagtgtgtgatgatgtgaatgaatgtgagactcctggaatctgtggtccagggacatgttacaacaccgttggcaactacacctgtatctgtcctccagactacatgcaagtgaatgggggaaataattgcatggatatgagaagaagtttgtgctacagaaactactatgctgacaaccagacctgtgatggagaattgttattcaacatgaccaagaagatgtgctgctgttcctacaacattggccgggcgtggaacaagccctgtgaacagtgtcccatcccaagtacagatgagtttgctacactctgtggaagtcaaaggccaggctttgtcatcgacatttataccggtttacccgttgatattgatgagtgccgggagatcccaggggtctgtgaaaatggagtgtgtatcaacatggttggcagcttccgatgtgaatgtccagtgggattcttctataatgacaagttgttggtttgtgaagatattgacgagtgtcagaacggcccagtgtgccagcgcaacgccgaatgcatcaacactgcaggcagctaccgctgtgactgtaagcccggctaccgcttcacctccacaggacagtgcaatgatcgtaatgaatgtcaagaaatccccaatatatgcagtcatgggcagtgcattgacacagttggaagcttttattgcctttgccacactggttttaaaacaaatgatgaccaaaccatgtgcttggacataaatgaatgtgaaagagatgcctgtgggaatggaacttgccggaacacaattggttccttcaactgccgctgcaatcatggtttcatcctttctcacaacaatgactgtatagatgttgatgaatgtgcaagtggaaatgggaatctttgcagaaatggccaatgcattaatacagtggggtctttccagtgccagtgcaatgaaggctatgaggtggctccagatgggaggacctgtgtggatatcaatgaatgtcttctagaacccagaaaatgtgcaccaggtacctgtcaaaacttggatgggtcctacagatgcatttgcccacctggatacagtcttcaaaatgagaagtgtgaagatattgatgagtgtgtcgaagagccagaaatttgtgccctgggcacatgcagtaacactgaaggcagcttcaaatgtctgtgtccagaagggttttccttgtcctccagtggaagaaggtgccaagatttgcgaatgagctactgttatgcgaagtttgaaggaggaaagtgttcatcacccaaatccagaaatcactccaagcaggaatgctgctgtgccttgaagggagaaggctggggagacccctgcgagctctgccccacggaacctgatgaggccttccgccagatatgtccttatggaagtgggatcatcgtgggacctgatgattcagcagttgatatggacgaatgcaaagaacccgatgtctgtaaacatggacagtgcatcaatacagatggttcctatcgctgcgagtgtccctttggttatactctagcagggaatgaatgtgtagatactgatgaatgttctgttggcaatccttgtggaaatggaacctgcaagaatgtgattggaggttttgaatgcacctgcgaggagggatttgagcccggtccaatgatgacatgtgaagatataaatgaatgtgcccagaatcctctgctctgtgccttccgatgtgtgaacacttatgggtcatatgaatgcaaatgtcccgtgggatatgtgctcagagaagaccgtaggatgtgcaaagatgaggatgagtgtgaagagggaaaacatgactgtactgaaaaacaaatggaatgcaagaacctcattggcacatatatgtgcatctgtggacccgggtatcagcggagacctgatggagaaggctgtgtagatgagaatgaatgtcagacgaagccagggatctgtgagaatgggcgctgcctcaacacccgtgggagctacacctgtgagtgtaatgatgggtttaccgccagccccaaccaggacgagtgccttgacaatcgggaagggtactgcttcacagaggtgctacaaaacatgtgtcagatcggctccagcaacaggaaccccgtcaccaaatcggaatgctgctgtgacggagggagaggctggggtccccactgtgagatctgccctttccaggggactgtggctttcaagaaactctgtccccatggccgaggattcatgaccaatggagcagatatcgatgaatgcaaggttattcacgatgtttgccgaaatggggaatgtgtcaatgacagaggatcatatcattgcatttgtaaaactgggtacactccagatataactgggacttcctgtgtagatctgaacgagtgcaaccaggctcccaaaccctgcaattttatctgcaaaaacacagaagggagttaccagtgttcatgcccgaaaggctacattctgcaagaggatggaaggagctgcaaagatcttgatgagtgtgcaaccaagcaacacaactgccagttcctatgtgttaacaccattggcggcttcacatgcaaatgtcctcccggatttacccaacaccatacgtcctgcattgataacaatgaatgcacctctgacatcaatctgtgcgggtctaagggcatttgccagaacactcctggaagcttcacctgtgaatgccagcggggattctcacttgatcagaccggctccagctgtgaagacgtggacgagtgtgagggtaaccaccgctgccagcatggctgccagaacatcattgggggctacaggtgcagctgcccccagggctacctccagcactaccagtggaaccagtgtgttgatgaaaacgaatgcctcagcgctcacatctgcggaggagcctcctgtcacaacaccctggggagctacaagtgcatgtgtcccgccggcttccagtatgaacagttcagtggaggatgccaagacatcaatgaatgtggctctgcgcaggccccctgcagctatggctgttccaataccgagggcggttacctgtgtggctgtccacctggttacttccgcataggccaagggcactgtgtttctggaatgggcatgggccgaggaaacccagagccacctgtcagtggtgaaatggatgacaattcactctccccagaggcttgttacgagtgtaagatcaatggctaccccaaacggggcaggaaacggagaagcacaaacgaaactgatgcctccaatatcgaggatcagtctgagacagaagccaatgtgagtcttgcaagttgggatgttgagaagacagccatctttgctttcaatatttcccacgtcagtaacaaggttcgaatcctagaactccttccagctcttacaactctgacgaatcacaacagatacttgatcgaatctggaaatgaagatggcttctttaaaatcaaccaaaaggaagggatcagctacctccacttcacaaagaagaagccagtggctggaacctattcattacaaatcagtagtactccactttataaaaagaaagaacttaaccaactagaagacaaatatgacaaagactacctcagtggtgaactgggtgataatctgaagatgaaaatccaggttttgcttcattaattcaccatccagaaccaaataattaaaagaaaaacaaatatagataggtagaactatattttcccccaatcagaatcatcatatcataggtacaatctttcaccaagtaaatttgtataaataagcactattctttgtattaccaaagcaaggtacaggtgactaccctagttcaaaacaaccactttctcaggcttctcatgtgtgtagctaagctaccttgtcatatgtgttgattcttgaaaactgggacgtgtatttccattgggggttggccatttatgctgacatgccatccttccagcaaacgtagggaatgtgctttcaattgatggactactctattttttgcaaatttgtaaactttgcttctccaaatacaagtactaggttgtccatttatggtacctatttggtgctagtaaattttcaaactagatttataaatgcactgtaatatgtacacaacttagaaaccaaattacaagtattcagttccaatacttcattaatttcaatcaaccaaagttagttcagtagcttatctcagttatgagtataatacattacatgtaaattaagtgtgtgtatactgtaatcgtgctattttttatcattgaaacatttataaactagaataataatgcccttaatgtgagggtttgtaatggtgcttattaagaccaaagacttgttaaatgtatacaccaagtggtaatgaaatttcgtgactggcccacacgtgcatagaggtctgggaggaccaggaaacagcctcagtggccagaggatcaccagtgcatccttcatcacagcatgtgcaatatgccaagattaccctcggtcattcctgtcaacaaggggtcaatgtcataaatgtcacaataaaacaatctcttcttttttttagttt

SEQ ID NO: 109 - DNA, 522 bp, Homo sapiens
  misc_feature (337)..(337): n is a, c, g, or t
aacctcagcgcagagccctgcccacagcaggtgcccagtgaatacctgatgacaaaaggaatcagaggaaaatacaaatcagacagaaaagctgtggaaaatgcagatactccctcaggaacagcagaaatccaaagcagacaccacctccacccctcacatcagccagacctggagagaacgatcatcttgaatgacaatgatgaacacagcgctccctattttgctaagcgctgtgctaaactatatgccttaactcatcttaatgtctacaacagcttatatgagggctttaaaccaaggcttggtaaactactgcccatgggccaaacctggnccatcatctagttctgtatagcccacaagccaagaatggtttttacatttttaagtggttgaaaaaaaatcaaaagaatattttgagactgtgaaaaccgtatgaaattcaaattccaatatccaacaaataaagttttattggaacggggccacactatttacttaatactgtggctgcttttg

SEQ ID NO: 110 - DNA, 1762 bp, Homo sapiens
tggggcactggtacctccaggacctggagtgtactggaagaaatggtgcagtccagatgcatcactgtaagcgataccgctcccctgaaccagacccgtacctgagctaccgatggaagaggaggaggtcctacagtcgggaacatgaagggagactgcgatacccgtcccgaagggagcctcccccacgaagatctcggtccagaagccatgaccgcctgccctaccagaggaggtaccgggagcgccgtgacagcgatacataccggtgtgaagagcggagcccatcctttggagaggactactatggaccttcacgttctcgtcatcgtcggcgatcgcgggagagggggccataccggacccgcaagcatgcccaccactgccacaaacgccgcaccaggtcttgtagcagcgcctcctcgagaagccaacagagcagtaagcgcacaggccggagtgtggaagatgacaaggagggtcacctggtgtgccggatcggcgattggctccaagagcgatatgagattgtggggaacctgggtgaaggcacctttggcaaggtggtggagtgcttggaccatgccagagggaagtctcaggttgccctgaagatcatccgcaacgtgggcaagtaccgggaggctgcccggctagaaatcaacgtgctcaaaaaaatcaaggagaaggacaaagaaaacaagttcctgtgtgtcttgatgtctgactggttcaacttccacggtcacatgtgcatcgcctttgagctcctgggcaagaacacctttgagttcctgaaggagaataacttccagccttaccccctaccacatgtccggcacatggcctaccagctctgccacgcccttagatttctgcatgagaatcagctgacccatacagacttgaaacctgagaacatcctgtttgtgaattctgagtttgaaaccctctacaatgagcacaagagctgtgaggagaagtcagtgaagaacaccagcatccgagtggctgactttggcagtgccacatttgaccatgagcaccacaccaccattgtggccacccgtcactatcgcccgcctgaggtgatccttgagctgggctgggcacagccctgtgacgtctggagcattggctgcattctctttgagtactaccggggcttcacactcttccagacccacgaaaaccgagagcacctggtgatgatggagaagatcctagggcccatcccatcacacatgatccaccgtaccaggaagcagaaatatttctacaaagggggcctagtttgggatgagaacagctctgacggccggtatgtgaaggagaactgcaaacctctgaagagttacatgctccaagactccctggagcacgtgcagctgtttgacctgatgaggaggatgttagaatttgaccctgcccagcgcatcacactggccgaggccctgctgcaccccttctttgctggcctgacccctgaggagcggtccttccacaccagccgcaacccaagcagatgacaggcacaggccaccgcatgaggagatggagggcgggactgggccgcccagccccttgactccagcctcgaccgccagccccaggccagagccacccaatgaacagtgcaatgtgaaggaaggcaggagcctgcaggggagcagacttggtgcccagctgccagaaagcacagatttgacccaagctatttatatgttataaagttataataaagtgtttcttactgtttgta

SEQ ID NO: 111 - DNA, 1916 bp, Homo sapiens
ggctaaatagattacctgagctggaattggaagcaattgataaccaatttggacaaccaggaacaggcgatcagattccatggacaaataatacagtgacggctataaatcagagtaaatcagaagaccagtgtattagctcacaattagatgagcttctctgtccacccacaacagtagaagggagaaatgatgagaaggctcttcttgaacagctggtatccttccttagtggcaaagatgaaactgagctagctgaactagacagagctctgggaattgacaaacttgttcaggggggtggattagatgtattatcagagagatttccaccacaacaagcaacgccacctttgatcatggaagaaagacccaacctttattcccagccttactcttctccttctcctactgccaatctccctagccctttccaaggcatggtcaggcaaaaaccttcactggggacgatgcctgttcaagtaacgcctccccgaggtgctttttcacctggcatgggcatgcagcccaggcaaactctaaacagacctccggctgcacctaaccagcttcgacttcaactacagcagcgattacagggacaacagcagttgatacaccaaaatcggcaagctatcttaaaccagtttgcagcaactgctcctgttggcatcaatatgagatcaggcatgcaacagcaaattacacctcagccacccctgaatgctcaaatgttggcacaacgtcagcgggaactgtacagtcaacagcaccgacagaggcagctaatacagcagcaaagagccatgcttatgaggcagcaaagctttgggaacaacctccctccctcatctggactaccagttcaaatggggaacccccgtcttcctcagggtgctccacagcaattcccctatccaccaaactatggtacaaatccaggaaccccacctgcttctaccagcccgttttcacaactagcagcaaatcctgaagcatccttggccaaccgcaacagcatggtgagcagaggcatgacaggaaacataggaggacagtttggcactggaatcaatcctcagatgcagcagaatgtcttccagtatccaggagcaggaatggttccccaaggtgaggccaactttgctccatctctaagccctgggagctccatggtgccgatgccaatccctcctcctcagagttctctgctccagcaaactccacctgcctccgggtatcagtcaccagacatgaaggcctggcagcaaggagcgataggaaacaacaatgtgttcagtcaagctgtccagaaccagcccacgcctgcacagccaggagtatacaacaacatgagcatcaccgtttccatggcaggtggaaatacgaatgttcagaacatgaacccaatgatggcccagatgcagatgagctctttgcagatgccaggaatgaacactgtgtgccctgagcagataaatgatcccgcactgagacacacaggcctctactgcaaccacctctcatccactgaccttctcaaaacagaagcagatggaacccaggacaagaagacagaagagttcttctctgtggtgactacagactagaggaatgctctagtgcaacaggttcaggtgtttgctgacgtccagtgtacagtgaatctggtaggcggggacccttacctgaaccagcctggtccactgggaactcaaaagcccacgtcaggaccacagaccccccaggcccagcagaagagcctccttcagcagctactgactgaataaccacttttaaaggaatgtgaaatttaaataatagacatacagagatatacaaatatattatatatttttctgagatttttgatatctcaatctgcagccattcttcaggtcgtagcatttggagca

SEQ ID NO: 112 - DNA, 4660 bp, Homo sapiens
ggggcttagaaattaacaggttgtttatataattggccttaaatgaggtgagagtgaagagactagagccatctctggaaaacatcattatcccattccccgggaagctaccctctggaactcaagatttgaccatatctgttttgaggattcattatgaacaaagaagtctcccaggtgtgaagtttttcaacatgagtggcctcggggacagttcatccgaccctgctaacccagactcacataagaggaaaggatcgccatgtgacacactggcatcaagcacggaaaagaggcgcagggagcaagaaaataaatatttagaagaactagctgagttactgtctgccaacattagtgacattgacagcttgagtgtaaaaccagacaaatgcaagattttgaagaaaacagtcgatcagatacagctaatgaagagaatggaacaagagaaatcaacaactgatgacgatgtacagaaatcagacatctcatcaagtagtcaaggagtgatagaaaaggaatccttgggaccccttcttttggaggctttggatggatttttctttgttgtgaactgtgaagggagaattgtatttgtgtcagagaatgtaaccagctacttaggttacaatcaggaggaattaatgaataccagcgtctacagcatactgcacgtgggggatcatgcagaatttgtgaagaatctgctaccaaaatcactagtaaatggagttccttggcctcaagaggcaacacgacgaaatagccatacctttaactgcaggatgctaattcaccctccagatgagccagggaccgagaaccaagaagcttgccagcgttatgaagtaatgcagtgtttcactgtgtcacagccaaaatcaattcaagaggatggagaagatttccagtcatgtctgatttgtattgcacggcgattacctcggcctccagctattacgggtgtagaatcctttatgaccaagcaagatactacaggtaaaatcatctctattgatactagttccctgagagctgctggcagaactggttgggaagatttagtgaggaagtgcatttatgcttttttccaacctcagggcagagaaccatcttatgccagacagctgttccaagaagtgatgactcgtggcactgcctccagcccctcctatagattcatattgaatgatgggacaatgcttagcgcccacaccaagtgtaaactttgctaccctcaaagtccagacatgcaacctttcatcatgggaattcatatcatcgacagggagcacagtgggctttctcctcaagatgacactaattctggaatgtcaattccccgagtaaatccctcggtcaatcctagtatctctccagctcatggtgtggctcgttcatccacattgccaccatccaacagcaacatggtatccaccagaataaaccgccagcagagctcagaccttcatagcagcagtcatagtaattctagcaacagccaaggaagtttcggatgctcacccggaagtcagattgtagccaatgttgccttaaaccaaggacaggccagttcacagagcagtaatccctctttaaacctcaataattctcctatggaaggtacaggaatatccctagcacagttcatgtctccaaggagacaggttacttctggattggcaacaaggcccaggatgccaaacaattcctttcctcctaatatttcgacattaagctctcccgttggcatgacaagtagtgcctgtaataataataaccgatcttattcaaacatcccagtaacatctttacagggtatgaatgaaggacccaataactccgttggcttctctgccagttctccagtcctcaggcagatgagctcacagaattcacctagcagattaaatatacaaccagcaaaagctgagtccaaagataacaaagagattgcctcaattttaaatgaaatgattcaatctgacaacagctctagtgatggcaaacctctggattcagggcttctgcataacaatgacagactttcagatggagacagtaaatactctcaaaccagtcacaaactagtgcagcttttgacaacaactgccgaacagcagttacggcatgctgatatagacacaagctgcaaagatgtcctgtcttgcacaggcacttccaactctgcctctgctaactcttcaggaggttcttgtccctcttctcatagctcattgacagaacggcataaaattctacaccggctcttacaggagggtagcccctcagatatcaccactttgtctgtcgagcctgataaaaaggacagtgcatctacttctgtgtcagtgactggacaggtacaaggaaactccagtataaaactagaactggatgcttcaaagaaaaaagaatcaaaagaccatcagctcctacgctatcttttagataaagatgagaaagatttaagatcaactccaaacctgagcctggatgatgtaaaggtgaaagtggaaaagaaagaacagatggatccatgtaatacaaacccaaccccaatgaccaaacccactcctgaggaaataaaactggaggcccagagccagtttacagctgaccttgaccagtttgatcagttactgcccacgctggagaaggcagcacagttgccaggcttatgtgagacagacaggatggatggtgcggtcaccagtgtaaccatcaaatcggagatcctgccagcttcacttcagtccgccactgccagacccacttccaggctaaatagattacctgagctggaattggaagcaattgataaccaatttggacaaccaggaacaggcgatcagattccatggacaaataatacagtgacagctataaatcagagtaaatcagaagaccagtgtattagctcacaattagatgagcttctctgtccacccacaacagtagaagggagaaatgatgagaaggctcttcttgaacagctggtatccttccttagtggcaaagatgaaactgagctagctgaactagacagagctctgggaattgacaaacttgttcaggggggtggattagatgtattatcagagagatttccaccacaacaagcaacgccacctttgatcatggaagaaagacccaacctttattcccagccttactcttctccttctcctactgccaatctccctagccctttccaaggcatggtcaggcaaaaaccttcactggggacgatgcctgttcaagtaacacctccccgaggtgctttttcacctggcatgggcatgcagcccaggcaaactctaaacagacctccggctgcacctaaccagcttcgacttcaactacagcagcgattacagggacaacagcagttgatacaccaaaatcggcaagctatcttaaaccagtttgcagcaactgctcctgttggcatcaatatgagatcaggcatgcaacagcaaattacacctcagccacccctgaatgctcaaatgttggcacaacgtcagcgggaactgtacagtcaacagcaccgacagaggcagctaatacagcagcaaagagccatgcttatgaggcagcaaagctttgggaacaacctccctccctcatctggactaccagttcaaatggggaacccccgtcttcctcagggtgctccacagcaattcccctatccaccaaactatggtacaaatccaggaaccccacctgcttctaccagcccgttttcacaactagcagcaaatcctgaagcatccttggccaaccgcaacagcatggtgagcagaggcatgacaggaaacataggaggacagtttggcactggaatcaatcctcagatgcagcagaatgtcttccagtatccaggagcaggaatggttccccaaggtgaggccaactttgctccatctctaagccctgggagctccatggtgccgatgccaatccctcctcctcagagttctctgctccagcaaactccacctgcctccgggtatcagtcaccagacatgaaggcctggcagcaaggagcgataggaaacaacaatgtgttcagtcaagctgtccagaaccagcccacgcctgcacagccaggagtatacaacaacatgagcatcaccgtttccatggcaggtggaaatacgaatgttcagaacatgaacccaatgatggcccagatgcagatgagctctttgcagatgccaggaatgaacactgtgtgccctgagcagataaatgatcccgcactgagacacacaggcctctactgcaaccagctctcatccactgaccttctcaaaacagaagcagatggaacccaggtgcaacaggttcaggtgtttgctgacgtccagtgtacagtgaatctggtaggcggggacccttacctgaaccagcctggtccactgggaactcaaaagcccacgtcaggaccacagaccccccaggcccagcagaagagcctccttcagcagctactgactgaataaccacttttaaaggaatgtgaaatttaaataatagacatacagagatatacaaatatattatatatttttctgagatttttgatatctcaatctgcagccattcttcaggtcgtagcatttggagcaaaaaaaaaaaaaaaaaa

SEQ ID NO: 113 - DNA, 1952 bp, Homo sapiens
acaggccacaggccaagggcagcagtcaggcctgctctgtctgtgaacgctcccggcttggcctcggctgatgggccctcacgcctgaagcgggcaggaagctccgggatggatttcgggtctttggagaccgtggtggccaactctgccttcatcgccgcccgaggcagctttgacggcagcagctcccaaccctcccgggacaagaagtacctggccaagctcaagctgcccccgctgtccaagtgtgagtccctccgcgacagcctcagcctggagtttgagagtgtgtgcttggagcagcccatcggcaagaagctctttcagcagttcctacaatcggcagagaagcacctgccggccctggagctctggaaagacatcgaggactatgacacggcagacaatgacctccagccacagaaggcccagaccatcctggcccagtacctggacccccaggccaaactcttctgcagcttcctggatgaggggatagtggcgaagtttaaggaggggcctgtggagatccaggacgggctcttccagcccctgctgcaggccaccctggcacacctgggccaagcccccttccaggagtacctgggcagcctgtacttcctgaggttcctgcagtggaagtggctggaagcccagcccatgggggaggactggttcctggacttcagggtcctggggaaagggggcttcggggaggtgtcggcctgccagatgaaggcgaccggcaagctgtatgcctgcaagaagctgaacaagaagcggctgaagaagaggaagggctaccagggtgctatggtggagaagaagattctgatgaaagtacacagcaggttcatcgtgtctctggcctatgcgtttgaaaccaaagccgacctctgtctggtgatgaccatcatgaacggaggtgacatcaggtaccacatctacaacgtgaatgaggagaaccctggcttcccggagccgcgcgccctcttctacacggcgcagatcatctgcggcctggagcacctgcaccagaggcggatcgtctaccgcgacctcaagcccgagaacgtgctgctggacaatgacggcaatgtccggatctctgaccttgggctggccgtggagctgctggacggacagagcaagaccaagggctacgcagggaccccaggtttcatggcccccgagctcctgcagggcgaggagtacgacttctccgtggactactttgccctgggggtcaccctgtatgagatgattgcggccagaggacccttccgagcccgtggagagaaggtggagaacaaggagctgaagcaccggatcatctcagagcccgtgaagtaccctgataagttcagccaggccagcaaggacttctgcgaggcgctgctggagaaggacccggagaagcgcctggggttcagagatgagacctgcgacaagctccgtgcccaccccctcttcaaggaccttaactggaggcagctggaggctgggatgctgatgccccctttcatcccagactccaaaactgtctacgcaaaggatattcaggacgtgggtgccttttccaccgtcaaaggtgtggcctttgacaaaacagacacagaattctttcaggaatttgccactggcaactgccccatcccctggcaggaggagatgatcgagacgggcatctttggcgagctgaacgtgtggcgctcggacggtcagatgccggacgacatgaagggcatctccgggggctccagctcctcgtccaagtcagggatgtgtctggtttcctaggtgacgccccagagtccacgtggaggaaaaggacccatacggctcgatgggggccgcctgcctccgtggtgccagcctggggtctgctagcaaggggacacgtggttccctccacccaggtccccatcacgccatctccttgcggcccaagg

SEQ ID NO: 114 - DNA, 2318 bp, Homo sapiens
  misc_feature (256)..(256): n is a, c, g, or t
  misc_feature (261)..(261): n is a, c, g, or t
  misc_feature (964)..(965): n is a, c, g, or t
  misc_feature (1067)..(1075): n is a, c, g, or t
  misc_feature (1077)..(1080): n is a, c, g, or t
  misc_feature (1548)..(1548): n is a, c, g, or t
  misc_feature (1550)..(1551): n is a, c, g, or t
  misc_feature (1556)..(1558): n is a, c, g, or t
  misc_feature (1561)..(1561): n is a, c, g, or t
  misc_feature (1617)..(1617): n is a, c, g, or t
  misc_feature (1644)..(1644): n is a, c, g, or t
  misc_feature (1699)..(1699): n is a, c, g, or t
  misc_feature (2180)..(2180): n is a, c, g, or t
  misc_feature (2192)..(2192): n is a, c, g, or t
  misc_feature (2201)..(2201): n is a, c, g, or t
  misc_feature (2288)..(2288): n is a, c, g, or t
tcaaggaataggcagacatttcagcaaggctgctgaggaaggataggctgtggaaattaggatgcagcactcctgcccgggtcccgcctcggggtcgccaggccctgaaccccaacgccggcattagtcgcgcctgcgcacggccctgtggagccgcggaggcagggacggagaacggggcggaggcggagtcagggcgcccgcgcgtgggccccgcccccttatgtagggtataaagcccctcccgctcacagtntcccnagtcctcgaaggctcggaagcccgtcaccatgtcgtgcgagtcgtctatggttctcgggtactgggatattcgtgggctggcgcacgccatccgcctgctcctggagttcacggatacctcttatgaggagaaacggtacacgtgcggggaagctcctgactatgatcgaagccaatggctggatgtgaaattcaagctagacctggactttcctaatctgccctacctcctggatgggaagaacaagatcacccagagcaatgccatcttgcgctacatcgctcgcaagcacaacatgtgtggtgagactgaagaagaaaagattcgagtggacatcatagagaaccaagtaatggatttccgcacacaactgataaggctctgttacagctctgaccacgaaaaactgaagcctcagtacttggaagagctacctggacaactgaaacaattctccatgtttctggggaaattctcatggtttgccggggaaaagctcacctttgtggattttctcacctatgatatcttggatcagaaccgtatatttgaccccaagtgcctggatgagttcccaaacctgaaggctttcatgtgccgttttgaggctttggagaaaatcgctgcctacttacagtctgatcagttctgcaagatgcccatcaacaacaagatggcccagtggggcaacaagcctgtatnngctgagcaggaggcagacttgcagagcttgttttgtttcatcctgtccgtaaggggtcagcgctcttgctttgctcttttcaatgaatagcacttatgttannnnnnnnnannnnagtttctcttgggtataaaggctaaaagggaaaaaggatatgtggagaatcatcaagatatgaattgaatcgctgcgatactgtggcatttccctactccccaactgagttcaagggctgtaggttcatgcccaagccctgagagtgggtactagaaaaaacgagattgcacagttggagagagcaggtgtgttaaatgggactggagtccctgtgaagactgggtgaggataacacaagtaaaactgtggtactgatggacttaaccggagttcggaaaccgtcctgtgtacacatgggagtttagtgtgataaaggcagtatttcagactggtgggctagccaatagagttgggacaattgcttattgaaactcattaaaaataatagagccccacttgacactattcactaaaattaatctggaatttaaggcccaacattaaacacaaagctgttgaaatattnannaaaannnaanaatttttgtgaccacggggtaggagaagtttctttaaagacgtaaaaagaaaaaanccataggctgctctgcctgtggagtanccattctttattcttttactttttaaaataataacaatcacaaaggaaagatttnccaattgaataggatcaaattctacaacttttcctaaggcacccacaaataaatgacaagtgagacaaaaagcactagtataaagattatataaagacctataaatcattaagacaactgagtttttaaaaatggacaaaatccatgaacaatttataaaatagaaatatagccaaaaatgtctaaaagatgtttatgatgtaaggaattatcaattacaacagtgagaaaccatatttccttctatccgatgagtaaaaagtttctaaagtgttggcaaggcttaggaaagtgatatgcatttcctgctggtcaagttgtaaattagtatagctactttggaggacaattgtaaaatttaaatcatatcctatgacccagcaattccatgctataaaaactcatccatggccgggcttggtggctcacgcctgtaatcccagcactttgggaggctgaggtgggcagatcacgaggtcangagatcgagacnatcctggcnaacatgatgaaaccccgtttctactaaaaatacaaaaattagctgggcatggtggcatgtgcctatagtcccagctactcaggaggntgaggcaggagaattgcttgaacctgggag

SEQ ID NO: 115 - DNA, 2491 bp, Homo sapiens
  misc_feature (743)..(743): n is a, c, g, or t
  misc_feature (848)..(848): n is a, c, g, or t
  misc_feature (983)..(983): n is a, c, g, or t
  misc_feature (1344)..(1344): n is a, c, g, or t
  misc_feature (1353)..(1353): n is a, c, g, or t
  misc_feature (1483)..(1486): n is a, c, g, or t
  misc_feature (1488)..(1488): n is a, c, g, or t
  misc_feature (1643)..(1643): n is a, c, g, or t
  misc_feature (1661)..(1661): n is a, c, g, or t
  misc_feature (2024)..(2025): n is a, c, g, or t
  misc_feature (2027)..(2029): n is a, c, g, or t
  misc_feature (2031)..(2032): n is a, c, g, or t
  misc_feature (2034)..(2034): n is a, c, g, or t
  misc_feature (2102)..(2102): n is a, c, g, or t
  misc_feature (2149)..(2149): n is a, c, g, or t
  misc_feature (2186)..(2186): n is a, c, g, or t
  misc_feature (2260)..(2260): n is a, c, g, or t
  misc_feature (2418)..(2418): n is a, c, g, or t
  misc_feature (2470)..(2473): n is a, c, g, or t
ggcgatcccagagcccccgggcggccgcggctgccctgagccagcagcagagcctgcaggagcggctgcggctgcgggaggagcggaagcagcaggaggagctgatgaaggccttcgagacgcccgaggagaagcgcgcacggcggctggccaagaaggaggccaaggagcgcaagaagcgggagaagatgggctggggtgaggagtacatgggctacaccaacaccgacaaccccttcggagacaacaacctgctgggcaccttcatctggaataaggccctggagaagaaggggatcagccacctggaggagaaggagctgaaggagcggaacaagaggatccaggaggacaaccggctggagctgcagaaggtgaagcagctgcggctggagcgggagcgggagaaggccatgcgcgagcaggagctggagatgctgcagcgcgagaaggaggcagagcacttcaagacatgggaggagcaggaggacaacttccacctccagcaggccaagctgcgttccaagatccgcatccgggacgggcgggccaagcccatcgacctgctggccaagtacatcagcgctgaggatgacgatctggccgtggagatgcatgagccctacacgttcctcaacggcctcaccgtggccgacatggaggacctgctggaggatatccaggtctacatggagctggagcagggcaagaacgccgacttctggcgggacatgaccaccatnaccgaggacgagatctccaagctccgcaagctggaggcctcgggcaaggggccaggtgagcgccgcgagggggtcaacgcctccgtcagctctgatgtgcagtcngtgttcaaggggaagacatacaaccagctgcaggtcatcttccagggcatcgagggcaaaatccgcgctggtggccccaacctggacatgggctactgggagagcctcctgcagcagcttcgtgcccacatggcncgggcccggctgcgtgagcgccaccaggacgtgctgcggcagaagctgtacaaactgaagcaggagcagggcgtggagagcgagccgctgttccccatcctcaagcaggagccccagtcccccagccgcagcctggagcctgaggacgcggcgcccaccccgcccgggccctcctcggagggcggccccgcggaggccgaggtggacggcgcgaccccgacagagggcgacggcgacggggacggtgagggcgagggcgagggcgaggcggtgctcatggaggaggacctgatccagcagagcctggacgactacgacgccggcaggtacagcccgcggctgctcacggcgcacgagctgncactggacngcgcacgtgctggaaccggatgaggacctgcagcgcctgcagctctcgcgccagcagctccaggtcacgggagacgccagcgagagcgccgaggacatcttcttccggcgggccaaggagggcatgggcnnnnangaggcgcagttcagcgtggagatgccactcaccggcaaggcctacctgtgggccgacaagtaccggccacgcaagccgcgcttcttcaaccgcgtgcacacgggcttcgagtggaacaagtacaaccagacgcactacgactttgacaacccacngcccaagatcgtgcaggnatacaagttcaacatcttctaccccgacctcatcgacaagcgctccacgcccgagtacttcctggaggcctgcgccgacaacaaggatttcgccatcctgcgcttccacgcggggccgccctacgaggacatcgctttcaagatcgtcaaccgcgagtgggaatactcgcaccgccacggcttccgctgccagtttgccaacggcatcttccagctgtggtttcacttcaagcgctaccgctatcggcggccgggaccctgctggcgcccgatccgccactgcagaagagaccctctgtggacacccacactctgcagggactggcccccaactcaccccgtgctggctggtggggtccattnncnnncnncngggatccccccacctggcctgctcacggggccttggagcatgagaccagtgaccccgagttttgcccnatatcaggacagtggctccttctcactcccctttctcaggccagganggccgagggccacacgggtgccacagcccaggtcggnagtggcccagccggcaggcttgttcttcagcatccgacgggaacatctccaacagaagcaaaacggaaagtgcntcccggacccccagagggccacccaacctcaccagtcaccagccccagaccacccacagcccctcccagacaccccgcctcatctggaaatagttccgtttgtttctctaaaaagacttgtaggtgggaaaaaaaatcttttgttctcatggaattgncctattggcaagatcgcatgtttttttaataaacgttgtattttagaataannnnaaaaaaaaaaaaaaaaaa

SEQ ID NO: 116 - DNA, 1870 bp, Homo sapiens
  misc_feature (18)..(18): n is a, c, g, or t
  misc_feature (22)..(22): n is a, c, g, or t
  misc_feature (711)..(711): n is a, c, g, or t
  misc_feature (915)..(915): n is a, c, g, or t
  misc_feature (919)..(920): n is a, c, g, or t
  misc_feature (928)..(928): n is a, c, g, or t
  misc_feature (969)..(969): n is a, c, g, or t
  misc_feature (985)..(985): n is a, c, g, or t
  misc_feature (1069)..(1069): n is a, c, g, or t
  misc_feature (1287)..(1287): n is a, c, g, or t
  misc_feature (1291)..(1291): n is a, c, g, or t
  misc_feature (1331)..(1331): n is a, c, g, or t
  misc_feature (1835)..(1838): n is a, c, g, or t
aggctggaaccggatgangacntgcagcgcctgcagctctcgcgccagcagctccaggtcacgggagacgccagcgagagcgccgaggacatcttcttccggcgggccaaggagggcatgggccaggacgaggcgcagttcagcgtggagatgccactcaccggcaaggcctacctgtgggccgacaagtaccggccacgcaagccgcgcttcttcaaccgcgtgcacacgggcttcgagtggaacaagtacaaccagacgcactacgactttgacaacccaccgcccaagatcgtgcagggatacaagttcaacatcttctaccccgacctcatcgacaagcgctccacgcccgagtacttcctggaggcctgcgccgacaacaaggatttcgccatcctgcgcttccacgcggggccgccctacgaggacatcgctttcaagatcgtcaaccgcgagtgggaatactcgcaccgccacggcttccgctgccagtttgccaacggcatcttccagctgtggtttcacttcaagcgctaccgctatcggcggtgacggccctggggaacggcaggcaggtgtcctcgggggcacagtaaaggggcttcggtgaagctggtggtcactccggggccgctgtctgggctgcagggccgcgggttcacgtcccacctcaggccgcatctttctttcgccaggcctcagtttccncctatataaaaggggggtcaccattgagcctgccatggtgagctgaggagacactgggacaggctggcctagggtcctgatgcaacggagggggcgctaggggcatctttcgagcacgagggtggccagcagccgccagctgacctcaccgtccaggcggacactctccaccgcccctcagccaggctgggtggggcccacagngccnnccccaagnggcggccacacagggtgttgtggagatgggccagaggggcntgggcttggcggtgcnaggctcgtgagaagcaggaaactcaaggccagccctgccacatcacggggcacccactgggcgtgaggcagagcccgcggctgntggggcagctccagccctgcccacaggccaccctcgcccgcacaggcagcactgaggccgggaccctgctggcgcccgatccgccactgcagaagagaccctctgtggacacccacactctgcagggactggcccccaactcaccccgtgctggctggtggggtccatttccccgcagcgggtatggaggatgcgtcgaggtccctgtctctgtcaangtcntgggaaccaaaagtcactgagccgtcctccccccacctcngagcacagggcctggagggcaggggctccccgaaggctgggggttggagaagggtgaggggcttcccccagggatccccccacctggcctgctcacggggccttggagcatgagaccagtgaccccgagttttgcccatatcaggacagtggctccttctcactcccctttctcaggccaggagggccgagggccacacgggtgccacagcccaggtcggagtggcccagccggcaggcttgttcttcagcatccgacgggaacatctccaacagaagcaaaacggaaagtgcctcccggacccccagagggccacccaacctcaccagtcaccagccccagaccacccacagcccctcccagacaccccgcctcatctggaaatagttccgtttgtttctctaaaaagacttgtaggtgggaaaaaaaatcttttgttctcatggaattggcctattggcaagatcgcatgtttttttaataaacgttgtattttagaataannnnaaaaaaaaaaaaaaaaaaaaaaaaaaaaaaaa

SEQ ID NO: 117 - DNA, 1037 bp, Homo sapiens
  misc_feature (645)..(645): n is a, c, g, or t
gcgagggcgagggcgaggcggtgctcatggaggaggacctgatccagcagagcctggacgactacgacgccggcaggtacagcccgcggctgctcacggcgcacgagctgccactggacgcgcacgtgctggaaccggatgaggacctgcagcgcctgcagctctcgcgccagcagctccaggtcacgggagacgccagcgagagcgccgaggacatcttcttccggcgggccaaggagggcatgggccaggacgaggcgcagttcagcgtggagatgccactcaccggcaaggcctacctgtgggccgacaagtaccggccacgcaagccgcgcttcttcaaccgcgtgcacacgggcttcgagtggaacaagtacaaccagacgcactacgactttgacaacccaccgcccaagatcgtgcagggatacaagttcaacatcttctaccccgacctcatcgacaagcgctccacgcccgagtacttcctggaggcctgcgccgacaacaaggatttcgccatcctgcgcttcacgcggggccgcctacgaggacatcgctttcaagatcgtcaaccgcgagtgggaatactcgcaccgccacggcttccgctgccagtttgccaacggcatcttccagctgtgntttcacttcaagcgctaccgctatcggcggtgacggccctggggaacggcaggccaggagggccgagggccacacgggtgccacagcccaggtcggagtggcccagccggcaggcttgttcttcagcatccgacgggaacatctccaacagaagcaaaacggaaagtgcctcccggacccccagagggccacccaacctcaccagtcaccagccccagaccacccacagcccctcccagacaccccgcctcatctggaaatagttccgtttgtttctctaaaaagacttgtaggtgggaaaaaaaatcttttgttctcatggaattggcctattggcaagatcgcatgtttttttaataaacgttgtattttagaataaaaaaaaaaaaaaa

SEQ ID NO: 118 - DNA, 2921 bp, Homo sapiens
cagcgagcgccgtcgtctgcccgggcccgcccatcggggtccccaaccccatccggaccccgccgcccgagcgcgcggccccggaagcacccgcctcccggcatggtgctcaaggccttcttccccacgtgctgcgtctcggcggacagcgggctgctggtgggacggtgggtgccggagcagagcagcgccgtggtcctggcggtcctgcactttcccttcatccccatccaggtcaagcagctcctggcccaggtgcggcaggccagccaggtgggcgtggccgtgctgggcacctggtgccactgccggcaggagcccgaggagagcctgggccgcttcctggagagcctgggtgctgtcttcccccatgagccctggctgcggctgtgccgggagagaggcggcacgttctggagctgcgaggccacccaccggcaagcgcccactgcccccggtgcccctggtgaggaccaggtcatgctcatcttctatgaccagcgccaggtgttgctgtcacagctacacctgcccaccgtcctgcccgaccgccaggctggagccaccactgccagcacggggggcctggctgccgtcttcgacacggtagcacgcagtgaggtgctcttccgcagtgaccgctttgatgagggccccgtgcggctgagccactggcagtcggagggcgtggaggccagcatcctcgcggagctggccaggcgagcctcgggacccatttgtctgctgttggccagcctgctgtcgctggtctcagctgtcagtgcctgccgagtgttcaagctctggcccctgtccttcctcgggagcaaactctccacgtgcgaacagctccggcaccggctggagcacctcacgctaatcttcagtacacggaaggcggagaaccctgcccagctgatgaggaaggccaacacggtggcctctgtgctgctggacgtggccctgggcctcatgctgctgtcctggctccacgggagaagccgcatcgggcatctggccgacgccctcgttcctgtggctgaccacgtggccgaggagctccagcatctgctgcagtggctgatgggtgctcccgccgggctcaagatgaaccgtgcactggaccaggtgctgggccgcttcttcctctaccacatccacctgtggatcagctacatccacctcatgtcccccttcgtggagcacatcctttggcacgtgggcctctcggcctgcctgggcctgacggtggccctgtccctcctctcggacattatcgccctcctcaccttccacatctactgcttttacgtctatggagccaggctgtactgcctgaagatccatggcctgtcctcactgtggcgtctgttccgggggaagaagtggaacgttctgcgccagcgcgtggactcctgttcctatgacctggaccagctgttcatcgggactctgctcttcaccatcctgctcttcctcctgcctaccacagccctgtactacctggtgttcaccctgctccggctcctggtggtcgccgtgcagggcctgatccatctgctggtggacctcatcaactccctgccgctgtactcactgggtcttcggctctgccggccctacaggctggcggctggcgtgaagttccgtgtcctccggcacgaggccagcaggcccctccgcctcctgatgcagataaacccactgccctacagccgcgtggtgcacacctaccgcctccccagctgtggctgccaccccaagcactcctggggcgccctgtgccgcaagctgttccttggggagctcatctacccctggaggcagagaggggacaagcaggactgagggaactgctggctcgcctggcaccaccacacggccacagccagccatctgctctgccagggtggcaccagctcagctggcgcatgtcccgtgctttgtggacgctgctgtgtgctcctgaacacggcaggccctgctatcacaccttgggcttggaggtcattgggagtgagcagatgtgggggtggccagccaggctggccgcactccatcactggcactgcctgccttgggacccgcttcccacctgctgcggtcaccatggtggcgagcacagcaaccccaggtgtccagagcactgccccatgcccaccctgcatacccaggtccagagggtccgtccaccacagcagccccaggtggagggctggtctccctgggggctccccagtggctctgccctggctgtgggggtggagggaccttgccaggatgaaccctccagtcccaggcaccctctagctccctcagccgaacagcaccctgcatctgggggattgaagcagtcgctgacccccgtccccagcgggcccgggccctcactccctgaaccacacggggtttatttgcggatgttccctggagaggtcgctttgtgaagaaaccatcagcaggctgtgagcatcgccaggctgctgtgggggcgggagcagcctcagtgtcaagggcctgcccactgacccagccgtacctattcgtccacggtgccccgtagcagcaggtcctgcggccaaatctgtctcccttcatgggcctcccagggaaggaggaagccctgctgtgcagacacctctgtggccccccaggggtgtgagcggcctggggagggggccgtggcactgaggccgaaagtgcctgccagacggcacggtctgggtgcgggtgttccctgtgagcccgagtccgcttcaggaggggagcctgcaggtgccggctggtgaggggatgacgcgctgtgggtgggaggaggcagcgcccatctcagcagcaccaggactgcctgggactccctggcaacccagcaccggggaagccgtcagctgctgtgacaataaaacctgccccgtgtctgg

SEQ ID NO: 119 - DNA, 4744 bp, Homo sapiens
cggggggcccggagcgggatcgcggcacctgccgagcgggtcgccgcgtctgccgcggtccttggaccccgccgccgccctggcctgggagcttgccccgccgcagcggccggcagcgcggcgctccgcgggcggcaggcacgggccccgggccccctcacggcgcccagccgcgggcctcccgaggcaaaagcccgtgggccgccgcgatggccttcaagatggtgaagggcagcatcgaccgcatgttcgacaagaatctgcaggacttggtccgcggcatccgtaaccacaaggaggacgaggcaaaatacatatctcagtgcattgatgagatcaagcaggagctgaagcaggacaacatagcggtgaaggcgaacgcggtctgcaagctgacgtatttacagatgttgggatacgacatcagctgggccgccttcaacatcatagaagtgatgagtgcctccaagttcaccttcaagcgaattggctacctcgctgcttcccagagctttcacgaaggcaccgacgtcatcatgctgaccaccaatcagatccgtaaggacttgagcagccccagccagtacgacacaggtgttgcactgacgggtctgtcctgcttcgtcaccccagaccttgccagagacctggcaaatgacatcatgacactgatgtcacacaccaagccctacatcaggaagaaggctgtgctgatcgagcccctcaccaatctcatccacagcacgtctgccatgtctctcctctatgaatgtgtgaacaccgtgattgcagtgctcatctcgctgtcctccggcatgcccaaccacagcgccagcatccagctttgtgttcagaaattaaggatattgatcgaggactccgatcagaacttgaagtacctggggctgctggcaatgtccaagatcctgaagacccaccccaagtccgtgcagtcccacaaggacctcatcctgcagtgcctggacgacaaggacgagtccatccggctgcgggccctggacctgctctatgggatggtgtccaagaagaacctgatggagatcgtgaagaagctgatgacccacgtagacaaggcagagggtaccacctaccgtgacgagctgctcaccaagatcattgacatctgcagccagtccaactaccagtacatcaccaacttcgagtggtacatcagcatcctggtggagctgacccggctggagggcacacggcacggccacctcatcgccgcccaaatgctggacgtggccatccgcgtgaaggccatccgcaagttcgccgtgtcccagatgtctgcgctgcttgacagtgcacacctgctggccagcagcacccagcggaacgggatctgtgaggtgctgtacgctgccgcctggatctgcggggagttctcagagcatctgcaggaaccacaccacactttggaggccatgctgcggcccagagtcaccacgctgccaggccacatccaggccgtgtatgtgcagaacgtggtcaagctctacgcctccatcctgcagcagaaggagcaggccggggaggcagagggcgctcaggccgtcacccagctcatggtggaccggctgccccagtttgtgcagagcgcagacctggaggtgcaggagcgggcgtcctgcatcctgcagctggtcaagcacatccagaagcttcaggccaaggacgtgcctgtggcagaggaggtcagcgctctctttgctggggagctgaacccagtggcccccaaggcccagaagaaggttccagtccccgaaggcctggacctggacgcctggatcaatgagccactctcggacagcgagtcagaggacgagaggcccagggccgtcttccacgaggaggagcagcggcgtcccaagcaccggccgtcggaggcggacgaggaagagctggctcggcgccgagaggcccggaagcaggagcaggccaacaaccccttctacatcaagagctcgccatcgccacagaagcggtaccaggacaccccgggcgtggagcacattcccgtggtgcagattgacctctccgtccccttgaaggttccagggctgcctatgtcagatcagtatgtgaagctggaggaggagcggcggcaccggcagaagctggagaaggacaagaggaggaaaaagaggaaggagaaggagaagaagggcaagcgccgccacagctcgctgcccacggagagcgacgaggacatcgcccctgcccagcaggtggacatcgtcacagaggagatgcctgagaatgctctgcccagcgacgaggatgacaaagaccccaacgacccctacagggctctggatattgacctggataagcccttagccgacagcgagaaactgcctattcagaaacacagaaacaccgagacctcaaaatcccctgagaaggacgttcccatggtagaaaagaagagcaagaaacccaagaagaaagagaaaaaacacaaagagaaagagagagacaaggagaagaagaaggagaaggagaagaaggctgaggacctggacttctggctgtctaccaccccaccgcctgcccccgcccccgcccccgcccccgttccatccacggacgagtgtgaggacgccaagacggaggcgcagggcgaggaggacgatgccgaggggcaagaccaggacaagaaatctcccaagcctaagaagaagaagcacaggaaggagaaggaggagcggaccaaaggcaagaagaagtccaagaagcagcctccaggcagcgaggaggcagcgggggagccggtgcagaatggcgcgccagaggaggagcagctcccgcctgagtccagctactccctcctcgctgaaaattcctatgttaaaatgacctgtgacatccggggcagtctgcaggaggacagccaggtcactgtggccatcgtgctggagaacaggagcagcagcatcctcaagggcatggagctcagcgtgctggactcactcaatgccaggatggcccggccgcagggctcctccgtccacgatggcgtccccgtgcctttccagctgcccccaggcgtctccaacgaagcccagtatgtgttcaccatccagagcatcgtcatggcgcagaagctcaaggggaccctgtccttcattgccaagaatgacgagggtgcgacccacgagaagctggacttcaggctgcacttcagctgcagctcctacttgatcaccactccctgctacagtgacgcctttgctaagttgctggagtctggggacttgagcatgagctcaatcaaagtcgatggcattcggatgtccttccagaatcttctggcgaagatctgttttcaccaccatttttccgttgtggagcgagtggactcctgcgcctccatgtacagccgctccatccagggccaccatgtctgcctcctggtgaaaaagggtgagaactctgtctcagtcgacgggaagtgcagtgactccacgctactgagcaacttgttagaagagatgaaggcgacgctggccaagtgttgagagctgcctgcgagccccgcaccaccccgcggagcacgtacccagggaccgcagccctgacgtgtctcgcctctcctcagtcgtgtgtactgtacccaagcctgagtgttaatttaactctatgttgtccgccgtgtagacatccgaggtcatttgttgcgttgaattatctgaccatccttttttactgtgactcttcccattctctttggcaagaagtccccttctcgcccccaaaccagcaagggactcccccacctgggtctgtgccctgccccgcgctgggggccgagtccttgaatgtggcttcaggggctcctgtcctgggccagggcctgatgggcaccacgtgaggggcacttggtggacagggcggggctgacgtggcctcctctggggtcgcctgcttttgacccaaaggtcctgacggttgcgtccgggggaggggaaggaagggccgctgtcgccaaggttttctctcccagaacccacagtgggaaagcggtcttgccaggcgttgtccattgtcagtgtgctcgtgggctggtgactgggtcttgggatcccaggccacgcgccagccaggctgtgggcagggcggggccagggacgccaaagagaggttgcagtcagaaccgtggacggggtgggttgaggcctctctgccacccgtcttcctggtcagcagaagtgcatctcggcttgggtttggggtggtccgcatcccctgcttgccactatgcgcaccaaggtttccccacatccttcccagcacccttaggaaggcccaggcagggcctggaagcagcggacctgggctgttctgtgttgaaggagtgtgcccagtgcccttgggcaggacctgtgagagccacctcacaggcagagcccccaccaggcagggcaaggagactccgctcactccccacggccagcgtgggcacaggactgacccttcttcagagataatgacattttatcttctccttttgatgaaaactgtcactttagcatgtaatccattacagaatcccatgcagtgattccaggatttgaaattgtatgatgtgttacataagaatttatttgctatcgacattcccgtataaagagagagacatatcacgctgctgtcatgattttgtgtcaagatgatccaataaagttgtaaaacaggaaaaaaaaaaaaaaaaaaa

SEQ ID NO: 120 - DNA, 852 bp, Homo sapiens
tctctctctctctctctctctctggtgaacaggacccgtcgccatgggccgtgtgatccgtggacagaggaagggcgccgggtctgtgttccgcgcgcacgtgaagcaccgtaaaggcgctgcgcgcctgcgcgccgtggatttcgctgagcggcacggctacatcaagggcatcgtcaaggacatcatccacgacccgggccgcggcgcgcccctcgccaaggtggtcttccgggatccgtatcggtttaagaagcggacggagctgttcattgccgccgagggcattcacacgggccagtttgtgtattgcggcaagaaggcccagctcaacattggcaatgtgctccctgtgggcaccatgcctgagggtacaatcgtgtgctgcctggaggagaagcctggagaccgtggcaagctggcccgggcatcagggaactatgccaccgttatctcccacaaccctgagaccaagaagacccgtgtgaagctgccctccggctccaagaaggttatctcctcagccaacagagctgtggttggtgtggtggctggaggtggccgaattgacaaacccatcttgaaggctggccgggcgtaccacaaatataaggcaaagaggaactgctggccacgagtacggggtgtggccatgaatcctgtggagcatccttttggaggtggcaaccaccagcacatcggcaagccctccaccatccgcagagatgcccctgctggccgcaaagtgggtctcattgctgcccgccggactggacgtctccggggaaccaagactgtgcaggagaaagagaactagtgctgagggcctcaataaagtttgtgtttatgcca

SEQ ID NO: 121 - DNA, 2548 bp, Homo sapiens
ggggaaacacagcaaggaaatgtgagccccaggctgcagaaggaagagtcagtgaatggctgcggtgtgacaacatgcaccaccagtggcttctgctggccgcatgcttttgggtgattttcatgttcatggtggctagcaagttcatcacgttgacctttaaagacccagatgtgtacagtgccaaacaggagtttctgttcctgacaaccatgccggaagtgaggaagttgccagaagagaagcacattcctgaggaactgaagccaactgggaaggagcttccagacagccagctcgttcagcccctggtctacatggagcgcctggaactcatcagaaacgtctgcagggatgatgccctgaagaatctctcgcacactcctgtctccaagtttgtcctggaccgaatatttgtctgtgacaagcacaagattcttttctgccagactcccaaagtgggcaacacccagtggaagaaagtgctgattgttctaaatggagcattttcttccattgaggagatccccgaaaacgtggtgcacgaccacgagaagaacggccttcctcggctctcttccttcagtgatgcagaaattcagaagcgattgaaaacatacttcaagttttttattgtaagagatcccttcgaaagacttatttctgcatttaaggataaatttgttcacaatccccggtttgagccttggtacaggcatgagattgctcctggcatcatcagaaaatacaggaggaaccggacagagacccgggggatccagtttgaagatttcgtgcgctacctcggcgatccgaaccacagatggctagaccttcagtttggggaccacatcattcactgggtgacgtatgtagagctctgtgctccctgtgagataatgtacagtgtgattggacaccacgagaccctggaggacgatgccccatacatcttaaaagaggctggcattgaccacctggtgtcatacccgactatccctccgggcattaccgtgtataacagaaccaaggtggagcactatttcctgggcatcagcaaacgagacatccgacgcctgtatgcccgtttcgaaggggactttaagctctttgggtaccagaaaccagactttttgctaaactaatgcataagacctatgaattcaaatatctttattagacctggggctaaccaggtgaagatctgagcccagaaatgacccttcctccaccacacccctcctttgaggacgcccggggtctcccacaggcctgtgagttgcctcggcatatgacgcagaaccccaactgttacaacttagtttggatgtaagatgctctgaggaccctgcccacacccctgcgtgcattaggatgtcgctggcctttgctcacctcagaggggagaaaaggctaaagatttgcagtttgacagcccagcagggaggaagcatcacacagcgttaggagccgtttccttcaggtgttaaggaaggggatgcccctgaggttctcctggctagtcagggtggcttcacccatcactggtgggttgcaggaacagcacccaggactctgaggagggacagagaagcaagggggctgctgaaatcgcagagacttttgcagcatcagatctgaggagtaaaacggcacctctggccttcatcttggtgctgcgacaattgtggaggcaaagcattctttctgtgactattttgttcctgtagacagtcagcgatggccagagggtggtgtggtgtccaggggtccatctttccagaatccatgcctgtgtaatgctggtccatgcttctgaacctgtgtctgccaagcgcctatttcattcagcacaagacatacgattttagaaggtgaggggaggggaggctttttctacctgagaaggggagtgtctttgagggccttaaaaggaccatggcccaggaatgggggcgctggttgggcttggagctcaggctgctgtggatcccggcgcatcagttctgacttgccttacctgggtggacagcagtgaatctccacctgtcttctccagggagctcccatgttggggctgaagacgagcaggggcaacctgccagcatcacagaattcagtgtagtttatacatttcgattcctttcatctcagcaaaatgggcactgccagagccatttctgatcacaccaccatcctggaccatgtgactggaaggtgggtaaccaagttcaccagcaataaaacccagcgcccaggtagcctccagcagtgcggcttcctggcaacaaggtaggccctggtgcagggcaagccgcagcgaccatttcagataccgtccacagccaggaccgctgagaactgggacagtttcctgggatgagtgccagcctgagcctgcatggtgccgccgagcccggggtggaggagggagccaggcttcgcttcaaggcggcctctaccttttctcagaatggtttcctgattgtgtcaatgtgaaagttaaataaaatttatgtgccaaacctgaaaaaaaaaaaaaaaaaaa

SEQ ID NO: 122 - DNA, 2833 bp, Homo sapiens
acttgcgctgtcactcagcctggacgcgcttcttcgggtcgcgggtgcactccggcccggctcccgcctcggccccgatggacgccgcgttcctcctcgtcctcgggctgttggcccagagcctctgcctgtctttgggggttcctggatggaggaggcccaccaccctgtacccctggcgccgggcgcctgccctgagccgcgtgcggagggcctgggtcatccccccgatcagcgtatccgagaaccacaagcgtctcccctaccccctggttcagatcaagtcggacaagcagcagctgggcagcgtcatctacagcatccagggacccggcgtggatgaggagccccggggcgtcttctctatcgacaagttcacagggaaggtcttcctcaatgccatgctggaccgcgagaagactgatcgcttcaggctaagagcgtttgccctggacctgggaggatccaccctggaggaccccacggacctggagattgtagttgtggatcagaatgacaaccggccagccttcctgcaggaggcgttcactggccgcgtgctggagggtgcagtcccaggcacctatgtgaccagggcagaggccacagatgccgacgaccccgagacggacaacgcagcgctgcggttctccatcctgcagcagggcagccccgagctcttcagcatcgacgagctcacaggagagatccgcacagtgcaagtggggctggaccgcgaggtggtcgcggtgtacaatctgaccctgcaggtggcggacatgtctggagacggcctcacagccactgcctcagccatcatcacccttgatgacatcaatgacaatgcccccgagttcaccagggatgagttcttcatggaggccatagaggccgtcagcggagtggatgtgggacgcctggaagtggaggacagggacctgccaggctccccaaactgggtggccaggttcaccatcctggaaggcgaccccgatgggcagttcaccatccgcacggaccccaagaccaacgagggtgttctgtccattgtgaaggccctggactatgagagctgtgaacactacgaactcaaagtgtcggtgcagaatgaggccccgctgcaggcggctgcccttagggctgagcggggccaggccaaggtccgcgtgcatgtgcaggacaccaacgagccccccgtgttccaggagaacccacttcggaccagcctagcagagggggcacccccaggcactctggtggccaccttctctgcccgggaccctgacacagagcagctgcagaggctcagctactccaaggactacgacccggaagactggctgcaagtggacgcagccactggccggatccagacccagcacgtgctcagcccggcgtcccccttcctcaagggcggctggtacagagccatcgtcctggcccaggatgacgcctcccagccccgcaccgccaccggcaccctgtccatcgagatcctggaggtgaacgaccatgcacctgtgctggccccgccgccgccgggcagcctgtgcagcgagccacaccaaggcccaggcctcctcctgggcgccacggatgaggacctgcccccccacggggcccccttccacttccagctgagccccaggctcccagagctcggccggaactggagcctcagccaggtcaacgtgagccacgcgcgcctgcggccgcgacaccaggtccccgaaggcctgcaccgcctcagcctgctgctccgggactcggggcagccgccccagcagcgcgagcagcctctgaacgtgaccgtgtgccgctgcggcaaggacggcgtctgcctgccgggggccgcagcgctgctggcggggggcacaggcctcagcctgggcgcactggtcatcgtgctggccagcgccctcctgctgctggtgctggtcctgctcgtggcactccgggcgcggttctggaagcagtctcggggcaaggggctgctgcacggcccccaggacgaccttcgagacaatgtcctcaactacgatgagcaaggaggcggggaggaggaccaggacgcctacgacatcagccagctgcgtcacccgacagcgctgagcctgcctctgggaccgccgccacttcgcagagatgccccgcagggccgcctgcacccccagccaccccgagtgctgcccaccagccccctggacatcgccgacttcatcaatgatggcttggaggctgcagatagtgaccccagtgtgccgccttacgacacagccctcatctatgactacgagggtgacggctcggtggcggggacgctgagctccatcctgtccagccagggcgatgaggaccaggactacgactacctcagagactgggggccccgcttcgcccggctggcagacatgtatgggcacccgtgcgggttggagtacggggccagatgggaccaccaggccagggagggtctttctcctggggcactgctacccagacacagaggccggacagcctgaccctggggcgcaactggacatgccactccccggcctcgtggcagtgatggcccctgcagaggcagcctgaggtcaccgggcccgacccccctgggcctggggcagcctccttcctgtaggcgagggcccaagtctgggggcagaacctgagtgtggatggggcggccaggaagaggccccttcctgccggggtgggaagagtttctctccatcggccccatgcgggtcacctccctagtcccacctttgcctcctaccagtgaacctcatctttgtatgaaagacagcaacctcctgggtaaatctgaatg

SEQ ID NO: 123 - DNA, 2833 bp, Homo sapiens; identical to SEQ ID NO: 122

SEQ ID NO: 124 - DNA, 2149 bp, Homo sapiens
cagctgactcaggcaggctccatgctgaacggtcacacagagaggaaacaataaatctcagctactatgcaataaatatctcaagttttaacgaagaaaaacatcattgcagtgaaataaaaaattttaaaattttagaacaaagctaacaaatggctagttttctatgattcttcttcaaacgctttctttgagggggaaagagtcaaacaaacaagcagttttacctgaaataaagaactagttttagaggtcagaagaaaggagcaagttttgcgagaggcacggaaggagtgtgctggcagtacaatgacagttttcctttcctttgctttcctcgctgccattctgactcacatagggtgcagcaatcagcgccgaagtccagaaaacagtgggagaagatataaccggattcaacatgggcaatgtgcctacactttcattcttccagaacacgatggcaactgtcgtgagagtacgacagaccagtacaacacaaacgctctgcagagagatgctccacacgtggaaccggatttctcttcccagaaacttcaacatctggaacatgtgatggaaaattatactcagtggctgcaaaaacttgagaattacattgtggaaaacatgaagtcggagatggcccagatacagcagaatgcagttcagaaccacacggctaccatgctggagataggaaccagcctcctctctcagactgcagagcagaccagaaagctgacagatgttgagacccaggtactaaatcaaacttctcgacttgagatacagctgctggagaattcattatccacctacaagctagagaagcaacttcttcaacagacaaatgaaatcttgaagatccatgaaaaaaacagtttattagaacataaaatcttagaaatggaaggaaaacacaaggaagagttggacaccttaaaggaagagaaagagaaccttcaaggcttggttactcgtcaaacatatataatccaggagctggaaaagcaattaaacagagctaccaccaacaacagtgtccttcagaagcagcaactggagctgatggacacagtccacaaccttgtcaatctttgcactaaagaaggtgttttactaaagggaggaaaaagagaggaagagaaaccatttagagactgtgcagatgtatatcaagctggttttaataaaagtggaatctacactatttatattaataatatgccagaacccaaaaaggtgttttgcaatatggatgtcaatgggggaggttggactgtaatacaacatcgtgaagatggaagtctagatttccaaagaggctggaaggaatataaaatgggttttggaaatccctccggtgaatattggctggggaatgagtttatttttgccattaccagtcagaggcagtacatgctaagaattgagttaatggactgggaagggaaccgagcctattcacagtatgacagattccacataggaaatgaaaagcaaaactataggttgtatttaaaaggtcacactgggacagcaggaaaacagagcagcctgatcttacacggtgctgatttcagcactaaagatgctgataatgacaactgtatgtgcaaatgtgccctcatgttaacaggaggatggtggtttgatgcttgtggcccctccaatctaaatggaatgttctatactgcgggacaaaaccatggaaaactgaatgggataaagtggcactacttcaaagggcccagttactccttacgttccacaactatgatgattcgacctttagatttttgaaagcgcaatgtcagaagcgattatgaaagcaacaaagaaatccggagaagctgccaggtgagaaactgtttgaaaacttcagaagcaaacaatattgtctcccttccagcaataagtggtagttatgtgaagtcaccaaggttcttgaccgtgaatctggagccgtttgagttcacaagagtctctacttggggtgacagtgctcacgtggctcgactatagaaaactccactgactgtcgggctttaaaaagggaagaaactgctgagcttgctgtgcttcaaactactactggaccttattttggaactatggtagccagatgataaatatggttaatttc

SEQ ID NO: 125 - DNA, 3809 bp, Homo sapiens
gccgctgttatgcgtattcccgtagacccaagcaccagccgccgcttcacacctccctccccggccttcccctgcggcggcggcggcggcaagatgggcgagaacagcggcgcgctgagcgcgcaggcggccgtggggcccggagggcgcgcccggcccgaggtgcgctcgatggtggacgtgctggcggaccacgcaggcgagctcgtgcgcaccgacagccccaacttcctctgctccgtgctgccctcgcactggcgctgcaacaagacgctgcccgtcgccttcaaggtggtggcattgggggacgtgccggatggtacggtggtgactgtgatggcaggcaatgacgagaactactccgctgagctgcgcaatgcctcggccgtcatgaagaaccaggtggccaggttcaacgaccttcgcttcgtgggccgcagtgggcgagggaagagtttcaccctgaccatcactgtgttcaccaaccccacccaagtggcgacctaccaccgagccatcaaggtgaccgtggacggaccccgggagcccagacggcaccggcagaagctggaggaccagaccaagccgttccctgaccgctttggggacctggaacggctgcgcatgcgggtgacaccgagcacacccagcccccgaggctcactcagcaccacaagccacttcagcagccagccccagaccccaatccaaggcacctcggaactgaacccattctccgacccccgccagtttgaccgctccttccccacgctgccaaccctcacggagagccgcttcccagaccccaggatgcattatcccggggccatgtcagctgccttcccctacagcgccacgccctcgggcacgagcatcagcagcctcagcgtggcgggcatgccggccaccagccgcttccaccatacctacctcccgccaccctacccgggggccccgcagaaccagagcgggcccttccaggccaacccgtccccctaccacctctactacgggacatcctctggctcctaccagttctccatggtggccggcagcagcagtgggggcgaccgctcacctacccgcatgctggcctcttgcaccagcagcgctgcctctgtcgccgccggcaacctcatgaaccccagcctgggcggccagagtgatggcgtggaggccgacggcagccacagcaactcacccacggccctgagcacgccaggccgcatggatgaggccgtgtggcggccctactgaccgccctggtggactcctcccgctggaggcggggaccctaacaaccttcaagaccagtgatgggccggctccgaggctccgggcgggaatgggacctgcgctccagggtggtctcggtcccagggtggtcccagctggtgggagcctctggctgcatctgtgcagccacatccttgtacagaggcataggttaccacccccaccccggcccgggatactgcccccggcccagatcctggccgtctcatcccatacttctgtggggaatcagcctcctgccacccccccggaaggacctcactgtctccagctatgcccagtgctgcatgggacccatgtctcctgggacagaggccatctctcttccagagagaggcagcattggcccacaggataagcctcaggccctgggaaacctcccgacccctgcaccttcgttggagcccctgcatcccctgggtccagccccctctgcatttacacagatttgagtcagaactggaaagtgtcccccacccccaccaccctcgagcggggttcccctcattgtacagatggggcaggacccagcacgctgctggcagagatggtttgagaacacatccaagccagtccccccagcccagcttcccctccgttcctaactgttggctttcccccagccgcacggtcccaggcccagagaagatgagtctatggcatcaggttcttaaaccaggaaagcacctacagaccggctcctccatgcactttaccagctcaacgcatccactctctgttctcttggcagggcgggggaggggggataggaggtcccctttcccctaggtggtctcataattccatttgtggagagaacaggagggccagatagataggtcctagcagaaggcattgaggtgagggatcattttgggtcagacatcaatgtccctgtcccccctgggtccagccaagctgtgccccatcccccaagcctcctgggaggatccagccaaatcttgcgactcctggcacacacctgtctgtaacctgttttgtgctctgaaagcaaatagtcctgagcaaaaaaaaaaaaaaaaaacaaaaaaacaaaaaaaaaacaaaacagtttttaaaactgattttagaaaaagaagcttaatctaacgttttcaaacacaaggtctcttacaggtatagttccgtgattatgatagctctgtgattataagcaacatccccgccccctctcccccccgcggacccccagctgcctcctgagggtgtggggttattagggtctcaatactttctcaaggggctacactccccatcaggcagcatcccaccagcctgcaccacaggctcccctgggaggacgagggaaacgctgatgagacgctgggcatctctcctctgtggctctaggacatctgtccaggaggctgggcggaggtgggcaggatgtgagaggtggggagtactggctgtgcgtggcaggacagaagcactgtaaagggctctccagcgcagctcagctgcactgcgttccgaggtgaagtcttgcccctgaattttgcaaaatgggaaagtgggcgcttgccaagggccaggctgcatggattctcacatcagagttctctggccctagaaaggcttagaaaaggcgtaagggaactcataaaggctagcagcatgcggtattttaactttctgcctcggcctctgtggatgcagaaatctgccctacaaaatgctcttcattggttgtctctgtgagagcactgtccccacccaacctgtcacaacggccagaaccatacaccagagacacactggcaggttaggcagtccttctggtgatcctattccattccctcctgctgcggtttctcttggcctgtcctcactggaaaaacagtctccatctcctcaaaatagttgctgactccctgcacccaaggggcctctccatgccttcttaggaagcagctatgaatccattgtccttgtagtttcttccctcctgttctctggttatagctggtcccaggtcagcgtgggaggcacctttgggttcccagtgcccagcactttgtagtctcatcccagattactaacccttcctgatcctggagaggcagggatagtaaataaattgctcttcctaccccatcccccatcccctgacaaaaagtgacggcagccgtactgagtctgtaaggcccaaagtgggtacagacagcctgggctggtaaaagtaggtccttatttacaaggctgcgttaaagttgtactaggcaaacacactgatgtaggaagcacgaggaaaggaagacgttttgatatagtgttactgtgagcctgtcagtagtgggtaccaatcttttgtgacatattgtcatgctgaggtgtgacacctgctgcactcatctgatgtaaaaccatcccagagctggcgagaggatggagctgggtggaaactgctttgcactatcgtttgcttggtgtttgtttttaacgcacaacttgcttgtacagtaaactgtcttctgtactatttaactgta

SEQ ID NO: 126 - DNA, 1193 bp, Homo sapiens
ataaatggggaggggagagcccactgggtagaaggaacagggagcggccaggatgctgaatctgctgctgctggcgctgcccgtcctggcgagccgcgcctacgcggcccctgccccaggccaggccctgcagcgagtgggcatcgtcgggggtcaggaggcccccaggagcaagtggccctggcaggtgagcctgagagtccacggcccatactggatgcacttctgcgggggctccctcatccacccccagtgggtgctgaccgcagcgcactgcgtgggaccggacgtcaaggatctggccgccctcagggtgcaactgcgggagcagcacctctactaccaggaccagctgctgccggtcagcaggatcatcgtgcacccacagttctacaccgcccagatcggagcggacatcgccctgctggagctggaggagccggtgaacgtctccagccacgtccacacggtcaccctgccccctgcctcagagaccttccccccggggatgccgtgctgggtcactggctggggcgatgtggacaatgatgagcgcctcccaccgccatttcctctgaagcaggtgaaggtccccataatggaaaaccacatttgtgacgcaaaataccaccttggcgcctacacgggagacgacgtccgcatcgtccgtgacgacatgctgtgtgccgggaacacccggagggactcatgccagggcgactccggagggcccctggtgtgcaaggtgaatggcacctggctgcaggcgggcgtggtcagctggggcgagggctgtgcccagcccaaccggcctggcatctacacccgtgtcacctactacttggactggatccaccactatgtccccaaaaagccgtgagtcaggcctgggttggccacctgggtcactggaggaccaacccctgctgtccaaaacaccactgcttcctacccaggtggcgactgccccccacaccttccctgccccgtcctgagtgccccttcctgtcctaagccccctgctctcttctgagccccttcccctgtcctgaggacccttccctatcctgagcccccttccctgtcctaagcctgacgcctgcaccgggccctccagccctcccctgcccagatagctggtggtgggcgctaatcctcctgagtgctggacctcattaaagtgcatggaaatc

SEQ ID NO: 127 - DNA, 1148 bp, Homo sapiens
ggccaggatgctgaatctgctgctgctggcgctgcccgtcctggcgagccgcgcctacgcggcccctgccccaggccaggccctgcagcgagtgggcatcgttgggggtcaggaggcccccaggagcaagtggccctggcaggtgagcctgagagtccacggcccatactggatgcacttctgcgggggctccctcatccacccccagtgggtgctgaccgcagcgcactgcgtgggaccggacgtcaaggatctggccgccctcagggtgcaactgcgggagcagcacctctactaccaggaccagctgctgccggtcagcaggatcatcgtgcacccacagttctacaccgcccagatcggagcggacatcgccctgctggagctggaggagccggtgaaggtctccagccacgtccacacggtcaccctgccccctgcctcagagaccttccccccggggatgccgtgctgggtcactggctggggcgatgtggacaatgatgagcgcctcccaccgccatttcctctgaagcaggtgaaggtccccataatggaaaaccacatttgtgacgcaaaataccaccttggcgcctacacgggagacgacgtccgcatcgtccgtgacgacatgctgtgtgccgggaacacccggagggactcatgccagggcgactccggagggcccctggtgtgcaaggtgaatggcacctggctgcaggcgggcgtggtcagctggggcgagggctgtgcccagcccaaccggcctggcatctacacccgtgtcacctactacttggactggatccaccactatgtccccaaaaagccgtgagtcaggcctgggttggccacctgggtcactggaggaccaacccctgctgtccaaaacaccactgcttcctacccaggtggcgactgccccccacaccttccctgccccgtcctgagtgccccttcctgtcctaagccccctgctctcttctgagccccttcccctgtcctgaggacccttccccatcctgagcccccttccctgtcctaagcctgacgcctgcaccgggccctccggccctcccctgcccaggcagctggtggtgggcgctaatcctcctgagtgctggacctcattaaagtgcatggaaatc

SEQ ID NO: 128 - DNA, 918 bp, Homo sapiens
ggattagcgcccaccaccagctatctgggcaggggagggccggagggcccggtgcaggcgtcaggcttaggacagggaagggggctcaggatggggaagggtcctcaggacaggggaaggggctcagaagagagcagggggcttaggacaggaaggggcactcaggacggggcagggaaggtgtggggggcagtcgccacctgggtaggaagcagtggtgttttggacagcaggggttggtcctccagtgacccaggtggccaacccaggcctgactcacggctttttggggacatagtggtggatccagtccaagtagtaggtgacacgggtgtagatgccaggccggttgggctgggcacagccctcgccccagctgaccacgcccgcctgcagccaggtgccattcaccttgcacaccaggggccctccggagtcgccctggcatgagtccctccgggtgttcccggcacacagcatgtcgtcacggacgatgcggacgtcgtctcccgtgtaggcgccaaggtggtattttgcgtcacaaatgtggttttccattatggggaccttcacctgcttcagaggaaatggcggtgggaggcgctcatcattgtccacatcgccccagccagtgacccagcacggcatccccggggggaaggtctctgaggcagggggcagggtgaccgtgtggacgtggctggagacgttcaccggctcctccagctccagcagggcgatgtccgctccgatctgggcggtgtagaactgtgggtgcacgatgatcctgctgaccggcagcagctggtcctggtagtagaggtgctgctcccgcagttgcaccggtcccacgcagtgcgctgcggtcagcacccactgggggtggatgagggagcccccgcagaagtgcatccagta

SEQ ID NO: 129 - DNA, 1206 bp, Homo sapiens
  misc_feature (30)..(30): n is a, c, g, or t
  misc_feature (250)..(250): n is a, c, g, or t
  misc_feature (897)..(908): n is a, c, g, or t
  misc_feature (911)..(914): n is a, c, g, or t
  misc_feature (962)..(962): n is a, c, g, or t
  misc_feature (988)..(988): n is a, c, g, or t
  misc_feature (990)..(990): n is a, c, g, or t
  misc_feature (1036)..(1036): n is a, c, g, or t
gagagagcgcgatgggccgcggcggtgggngcacgttccgcggggactcatgccacgcgcgtcccggcccgacgcgcaattagcagccacctccgcagcccgccgccaccgcctccctgccctcccgggctgccgcagctaggagctccagccgtcgcctcgcgcaggctgcgggcattgtcctctcggttcgccgcccgggctgctgctgccgccgcggactgctgcggggcccggacccgcaccccanggatacgctgccgccgccgccggccggcccggcgcccggcctccgttcggtggtttccgccctgcgttctctgggttgctctctcctgggtttttcctgcgtagctgaggaaggggaagagaagtccagccgccaagcccagccttccccggcgcgcagccccgacggggccgcggcaggcgcggcgagagcgctgacggagccatgagagagtacaaagtggtggtgctgggctcgggcggcgtgggcaagtccgcgctcaccgtgcagttcgtgacgggctccttcatcgagaagtacgacccgaccatcgaagacttttaccgcaaggagattgaggtggactcgtcgccgtcggtgctggagatcctggatacggcgggcaccgagcagttcgcgtccatgcgggacctgtacatcaagaacggccagggcttcatcctggtctacagcctcgtcaaccagcagagcttccaggacatcaagcccatgcgggaccagatcatccgcgtgaagcggtacgagcgcgtgcccatgatcctggtgggcaacaaggtggacctggagggtgagcgcgaggtctcgtacggggagggcaaggccctggctgaggagtggagctgccccttcatggagacgtcggccannnnnnnnnnnncgnnnnacgagctatttgccgagatcgtgcggcagatgaactacgcggcgcagnccaacggcgatgagggctgctgctcngnctgcgtgatcctctgaggcggccaccgcgcgccggccgcgctctgngcacaaaatccaaacgcattcgactctctaaatgtgattaatttcttgcttttgagattggagaccacttttgcatttggccaggctgtcttgcggagcccggcttggcctcgcgcggccgggcgtccccttgcctcttaccctgttgcccgaggggggtgtcccgggtc

SEQ ID NO: 130 - DNA, 1206 bp, Homo sapiens; identical to SEQ ID NO: 129
  misc_feature (30)..(30): n is a, c, g, or t
  misc_feature (250)..(250): n is a, c, g, or t
  misc_feature (897)..(908): n is a, c, g, or t
  misc_feature (911)..(914): n is a, c, g, or t
  misc_feature (962)..(962): n is a, c, g, or t
  misc_feature (988)..(988): n is a, c, g, or t
  misc_feature (990)..(990): n is a, c, g, or t
  misc_feature (1036)..(1036): n is a, c, g, or t

SEQ ID NO: 131 - DNA, 1604 bp, Homo sapiens
  misc_feature (172)..(173): n is a, c, g, or t
  misc_feature (898)..(898): n is a, c, g, or t
  misc_feature (909)..(909): n is a, c, g, or t
  misc_feature (932)..(932): n is a, c, g, or t
  misc_feature (941)..(941): n is a, c, g, or t
  misc_feature (986)..(986): n is a, c, g, or t
  misc_feature (1374)..(1374): n is a, c, g, or t
  misc_feature (1516)..(1516): n is a, c, g, or t
  misc_feature (1556)..(1556): n is a, c, g, or t
ttttttttttttttttttttttttttttcacaagggataaatagaactttattttaaataaacatttgcactctgtacacagccccagcagaagcagggctcagtcgtcagctgtcttgcgcacatcaaagctgccacagggtcctcgcagcagctctgccagtagcgcaannagctgcccgtgctcctcctgtacgctggggggaagtgcagccagctcgctgcgcaggctccgctccaccatgcggcccagggcccgccgcagctccttcagcagccgcacggtacgcgagtcaccctccagccgcagcaggtcactgtcgctcagtgagatggtggcccggcgcccgtcatcacggatgtgcacgtccccgtcggtcagcagcagcacagctagcgggtgcacctgagaggagtcccggacgaagacgctgccattggacttgactgccatgaaatacgtcagccatcggctccgtaaccgtgtgtaagcggttcgttgttcctgtccaccaggcccaggctcttcagtttcttgcaggccaaggctgccgccttattctcagcctctgctttgcggcgccctttggcaacaaaggtcatggggcagggccagagcagggtgagtgtagacagcttggtcttggtgcccacagtatggaactgcatgaggttcttagctgtggaggatgacgttgcaatctgaatcaccttggccagaaggttcttgggaagtggaaactgggtcagagccctaatggcactgtcgtcatctgtcatctcaaaggaactcccccttgagtccctgagtggagcgtgggaatcctgctgggtcatggacaagaagtcggtaacatctatggtcccttcttctagctcttcctcctcgtcctcctcntcttcccggcnctaaagagcgggataggcccccnaggtccccntggtcgaatactctctggattcagctgccgccaggaagtaggggncatggtgggttccggacgccaccagctgtcggcaggggagccaaagcgatcagctagcactcggtatttggctgcgtcaaacaactcattccggggacctagcagaccccaacccttgaacagctggcaggctgcagctgcagcctgccgctcagcatcgatcttcttgctgccatagccttctacctccacgctcttgggccattttatgtgcagtgtgactttctttttcttcggtccatttgtgtgcacgtagactagtttgtcttttgcatgtgagatgccgagggctcttccaatcacactgttgagaagatttttgggctgtgggaactcttttaataggtccctagaagcgttcaccaagcttccgtcgccttccccaggnccgccgggggccatccctgactcggcctcggcggcttccttggtgtggtcggggtgggcgcagcttgaagagaagccgcgcgagcgaccctgtcgcccagcagcgcggggacccagcggctgcaggcgcggagagatgccgncggccagcgccatgagtctcctagcggccgccatcgtgcncccgccgaccccgaggcctgtgcgcggcagggaccgggcgaagagaac

SEQ ID NO: 132 - DNA, 2938 bp, Homo sapiens
cggacgcgtgggcaggcagcagccgggcagggatgctcctgcgctcccgggcggcctcgggcccagccacctgctcgccggggaagaggacacgcagaggagcagctggcttgcccggagtcctcccaccttgacccaagcatgcagggcccaccccgcagcctccgcgctgggctcagcctggacgacttcatccctggccacctccagtcccacatagggtcttcctcccgggggacacgggtgcccgtgatccggaatggtggctccaacacccttaatttccagttccacgaccccgcgcccaggactgtgtgcaatgggggctacacaccaagacgagatgcttcccagcacccggaccctgcgtggtatcagacctggccaggccctgggagcaagccctctgcaagcacaaagatccctgcctcccagcacacccagaactggtcagccacgtggaccaaggacagcaagcgtcgggacaagcgctgggtcaagtacgagggaatcgggcccgtggacgagagcggcatgcccattgccccccgatccagcgttgacagacccagagactggtaccggagaatgttccagcagattcaccggaaaatgccagacttgcagctggactggaccttcgaggagccacccagagaccccaggcatctaggagcccagcaaagacctgcccacaggcccggcccggcaacatcttccagtggaagaagctgggaccactctgaagagttacctagaagcaccttcaactacagacctggagcattctccactgtgctgcagccctcaaatcaggtgctcagacgccgggaaaaagtagacaatgtctggacggaagagtcctggaaccagtttctgcaggaactagagactgggcagaggcccaagaaaccgctggtggacgaccctggtgagaagccctcccagcccattgaggtgctgctggagagagagctggccgagctgagcgccgagctggacaaggacctgcgggcaattgagacccgactgccgtcccccaagagctcgccggcgccccgacgggccccggagcagcggcccccggccggcccggcctcagcctggagctccagctacccacatgcaccttacctgggttccgcccggtccctgagtccccacaaaatggctgatggaggaagccccttcctaggtcggagggactttgtctacccttcctcaacccgagaccctagtgcctctaacggagggggcagcccagccaggagggaagagaagaagagaaaggccgccaggctcaagtttgacttccaggcgcagtcccccaaggagctgactctgcagaagggtgacattgtctacatccacaaggaggtggacaagaactggctggagggagagcaccacggccgcctgggcatcttccctgctaattatgtggaggtgctgcccgcagatgagatccctaagcccatcaagcccccgacctaccaggtgctggagtatggagaggctgtggcccagtacaccttcaagggggacctggaggtggagctgtccttccgcaagggagagcacatctgcctgatccgcaaggtgaacgagaactggtacgagggacgcatcacgggcacggggcgccaaggcatattccctgccagctacgtgcaggtgtctcgtgaaccccggctccggctctgtgacgacggcccccagctccccacgtctccccgcctgaccgctgccgcccgctcagcccgtcaccccagctccccctcagccctgcgcagcccagctgaccccaccgacttggggggacagacctccccccgtcgcactggcttctccttccccacccaggagcctagaccccagacccagaatcttggcacccctggtccagctctgtcccactctcgaggtcccagccatcccctggacctggggacctcctctcctaacacctctcagatacactggaccccgtaccgggcgatgtaccagtacaggccccagaacgaagacgagctggagctgcgcgagggggacagggtggatgtcatgcagcagtgtgacgatggctggtttgtgggtgtctcccggaggacccagaaattcggaacgttccctggaaattacgttgccccggtgtgagtggtctccatggcaacttggagccagccaggatggggtggggagcggtggcactcgtgggagggagaggacccccgcccacatcctccttccccaggacctgagctcccagcatctgcagacgacccccgcagcatttccctcggacccccctcgaagccccctggactgattcccacccacgactcacaggcattcctcccacagccctttcatttcctccccaccccactccccaaatacagaggtctgctttgaagcggagaccatttccaggccttattgagaccagaccccaagtcccccacccccatcctgctccagcgtttcctctaacagggaccagctctccgctttgcccccacggggttcctctaaccagaaccagcttcctagcctcgtagagaccaaaggccgcccccgcctgctggggttcctcccagcaccccagcttgctggctgccctctttgccttctggcctccagctgggtgtgggggggcggagcaaggcgggggacagacgcagcaccttcttagcgatctaggcctggcaagagctctggccccaaggcctcctcttcccaggggctgccaagtcctggccctggccctggcatatcaccccgcactgtggggccaggcaccactagcctggctcaaatattccccagggagactgctgtgtgctgcccgcctgcctgctggctctcccccagccccacatcccctctggaagagaatgtaaaataaacctggacacaagggccttcgtggcctcga

SEQ ID NO: 133 - DNA, 2032 bp, Homo sapiens
ttcctccaggagtctctggtgcagctggggtggaatctggccaggccctgcttaggcccccatcctggggtcaggaaatttggaggataaggcccttcagccccaaggttgtcctcgaccagtcccgtgccatggcagcccacctgcttcccatctgcgccctcttcctgaccttactcgatatggcccaaggctttaggggccccttgctacccaaccggcccttcaccaccgtctggaatgcaaacacccagtggtgcctggagaggcacggtgtggacgtggatgtcagtgtcttcgatgtggtagccaacccagggcagaccttccgcggccctgacatgacaattttctatagctcccagctgggcacctacccctactacacgcccactggggagcctgtgtttggtggtctgccccagaatgccagcctgattgcccacctggcccgcacattccaggacatcctggctgccatacctgctcctgacttctcagggctggcagtcatcgactgggaggcatggcgcccacgctgggccttcaactgggacaccaaggacatttaccggcagcgctcacgggcactggtacaggcacagcaccctgattggccagctcctcaggtggaggcagtagcccaggaccagttccagggagctgcacgggcctggatggcaggcaccctccagctggggggggcactgcgtcctcgcggcctctggggcttctatggcttccctgactgctacaactatgactttctaagccccaactacaccggccagtgcccatcaggcatccgtgcccaaaatgaccagctagggtggctgtggggccagagccgtgccctctatcccagcatctacatgcccgcagtgctggagggcacagggaagtcacagatgtatgtgcaacaccgtgtggccgaggcattccgtgtggctgtggctgctggtgaccccaatctgccggtgctgccctatgtccagatcttctatgacacgacaaaccactttctgcccctggatgagctggagcacagcctgggggagagtgcggcccagggggcagctggagtggtgctctgggtgagctgggaaaatacaagaaccaaggaatcatgtcaggccatcaaggagtatatggacactacactggggcccttcatcctgaacgtgaccagtggggcccttctctgcagtcaagccctgtgctccggccatggccgctgtgtccgccgcaccagccaccccaaagccctcctcctccttaaccctgccagtttctccatccagctcacgcctggtggtggccccctgagcctgcggggtgccctctcacttgaagatcaggcacagatggctgtggagttcaaatgtcgatgctaccctggctggcaggcaccgtggtgtgagcggaagagcatgtggtgattggccacacactgagttgcacatattgagaacctaatgcactctgggtctggccagggcttcctcaaatacatgcacagtcatacaagtcatggtcacagtaaagagtacactcagccactgtcacaggcatattccctgcacacacatgcatacttacagactggaatagtggcataaggagttagaaccacagcagacaccattcattcctgctccatatgcatctacttggcaaggtcatagacaattcctccagagacactgagccagtctttgaactgcagcaatcacaaaggctgacattcactgagtgcctactctttgccaatccccgtgctaagcgttttatgtggacttattcattcctcacaatgaggctatgaggaaactgagtcactcacattgagagtaagcacgttgcccaaggttgcacagcaagaaaagggagaagttgagattcaaacccaggctgtctagctccgggggtacagcccttgcactcctactgagtttgtggtaaccagccctgcacgacccctgaatctgctgagaggcaccagtccagcaaataaagcagtcatgatttactt

SEQ ID NO: 134 - DNA, 4408 bp, Homo sapiens
  misc_feature (176)..(176): n is a, c, g, or t
  misc_feature (775)..(775): n is a, c, g, or t
  misc_feature (802)..(803): n is a, c, g, or t
  misc_feature (808)..(808): n is a, c, g, or t
  misc_feature (813)..(813): n is a, c, g, or t
  misc_feature (817)..(817): n is a, c, g, or t
  misc_feature (902)..(902): n is a, c, g, or t
  misc_feature (905)..(905): n is a, c, g, or t
  misc_feature (966)..(966): n is a, c, g, or t
  misc_feature (970)..(970): n is a, c, g, or t
  misc_feature (994)..(994): n is a, c, g, or t
  misc_feature (1010)..(1011): n is a, c, g, or t
  misc_feature (1027)..(1027): n is a, c, g, or t
  misc_feature (1094)..(1094): n is a, c, g, or t
  misc_feature (1137)..(1137): n is a, c, g, or t
  misc_feature (1153)..(1153): n is a, c, g, or t
  misc_feature (1434)..(1434): n is a, c, g, or t
  misc_feature (1451)..(1451): n is a, c, g, or t
  misc_feature (1457)..(1457): n is a, c, g, or t
  misc_feature (1470)..(1470): n is a, c, g, or t
  misc_feature (1502)..(1502): n is a, c, g, or t
  misc_feature (1549)..(1549): n is a, c, g, or t
  misc_feature (1614)..(1614): n is a, c, g, or t
  misc_feature (1626)..(1626): n is a, c, g, or t
  misc_feature (1651)..(1651): n is a, c, g, or t
  misc_feature (1657)..(1657): n is a, c, g, or t
  misc_feature (1668)..(1668): n is a, c, g, or t
  misc_feature (1692)..(1692): n is a, c, g, or t
  misc_feature (1774)..(1774): n is a, c, g, or t
  misc_feature (1785)..(1785): n is a, c, g, or t
  misc_feature (1862)..(1862): n is a, c, g, or t
  misc_feature (2227)..(2227): n is a, c, g, or t
  misc_feature (2232)..(2233): n is a, c, g, or t
  misc_feature (2259)..(2259): n is a, c, g, or t
  misc_feature (2708)..(2708): n is a, c, g, or t
  misc_feature (4176)..(4176): n is a, c, g, or t
gagccatccatcggggagtttaatgagcaggttctgcgactgatgcacagccttggaatagatcagcagaaaaccattgagtctttgcagaacaagagctataaccactttgctgccatttatttcttgttggtggagcgcctgaaatcacatcggagcagtttcccagtggagcnagagacttgatggccgccagcgtcggcctagcaccattgctgagcaaacagttgccaaggcacagactgtggggctcccagtgaccatgcattcaccgaacatgaggctgctgcgatctgccctcctcccccaggcatccaacgtggaggccttttcatttccagcatctggctgtcaggcggaagctgcattcatggaagaagagtgtgtggacactccaaaggtcaatggctgtctgcttgaccctgtgcctcctgtcctggtgcggaagggatgccagtcactgcccagcaacatgatggagacctccattgacgaagggctggagacagaaggagaggccgaggaagaccccgctcatgcctttgaggcatttcagtccacacgcagcgggcagagacggcacactctgtcagaagtgaccaatcaactggtcgtgatgcctggggcagggaaaattttctccatgaatgacagcccctcccttgacagtgtggactctgagtatgatatggggtctgttcagagggacctgaactttctggaagacaacccttcccttaaggacatcatgttagccaatcagccttcaccccgnatgacatctcccttcataagcctgagnnctacnaaccnagcnatgcaggctctgagctcccagaaacgagaggtccacaacaggtctccagtgagcttcagagagggccgcagagcatcagataccnccntcacccagggaattgtagcatttagacaacatcttcagaatctggctagaaccaaaggaantctnagagttgaacaaagtgcagttgtngtatgaacaaataggnncggaggcagaccctancctggcgccggcggctcctcagctccaggaccttgctagcagctgccctcaggaagaagtttctcangcagcaggaaagcgtctccactctccctgccagcgtgcatccncagctgtccccacggncagagcctggagacccagtacctgcagcacagactccagaagcccagccttctgtcaaaggcccagaacacctgtcagctttattgcaaagaaccaccgcggagccttgagcagcagctgcaggaacataggctccagcagaagcgactctttcttcagaagcagtctcaactgcaggcctattttaatcagatgcagatagcagagagctcctacccacagccaagtcagcagctgccccttccccgccaggagactccaccgccttctcagcaggcccnaccgttcagcctgaccnagcccntgagccccgtccntggagccttcctccgagcagatgcaatacagncctttcctcagccagtaccaagagatgcagcttcagcccctgccctncacttccggtccccgggctgctcctcctctgcccacgcagctacagcagcagcagccgccaccgncaccaccccctncaccaccacgacagccaggagctgncccagnccccttacagntctcctatcagacttgtgagctgncaagcgctgcttcccctgcgccagactatcccactccctgtcagtatcctgtggatggagcccagcagagcgacctaacggngccagactgtnccagaagcccaggactgcaagaggccccctccagctacgacccactagccctctctgagctacctggactctttgantgtgaaatgctagacgctgtggatccacaacacaacgggtatgtcctggtgaattagtctcagcacaggaattgaggtgggtcaggtgaaggaagagtgtatgttcctatttttattccagccttttaaatttaaagcttattttcttgccctctccctaacggggagaaatcgagccacccaactggaatcagagggtctggctggggtggatgttgcttcctcctggttctgccccaccacaaagttttctgtggcaagtgctggaacatagttgtaggctgaggcaggagaatggcgtgaacccgggaggcggagcttgcagtgagccaagatcgtgccactgcactccagcctgggcgacngagcnngactccacctcaaaaaaaaaaaaaangacaagagcagtatcatctgcctctgtttctaaactggacaaagagattttcttaaagtttctatcatctcccttctgacaggttctacagtgtggtctgaagcacctgtaatgtcagagcccttgtctggcccttggtggcaggtgaacgaaagcagtggagcctctcaccttccagtagcctctcacattcttattttaccatttttgtcctaattaaggtagcctagctgattctagaagacagccatcctacgtgcacccccaccttgtgtccacatcttctccaggcaggtttcaacctatcagcagactcaggcacacactggggcacagatagagaaccaggcggcagcagtgctcgcagacccacccagggagagctgtgatgggttctgcccagatactctgctcgcccacccacaagggagcaatagcttatatttgtnacattagttttaccaagcactttctcttctaaccctcacaacaattctatgaaattagctggggagatactgtccttatttttcacagctgaagaaaccaaagctttgggaagtttgtgacttctctgagatcacagctggtgatagaaggagctgggacacgcgcttgggttgactggcttctggttttggttctctggcttctagtgctggaagaagccctctctttcccttctctttcctcagtagcatctgactcttttcataagcaaacagctgtataaacaaagcccccattttggtcaagcacagggtgaatgtgatattgttcccacaaccttattctccactcaacagccgcctggctttggggaagaggccgccttcaggtgacagtgcagctgtccaggtggccgtgcactgaaccaggctgagggagacaaaaaccccgcagacccgcctgcctttcagcgtccagttaactgcagaagtttaggctcacctcaaagatgtctagtttttccaagttacaatacagcagtttcctacagaacacccccttcctcaattgccaaggggccgcatcgcacggcatcaggccaccactgcaggccagcagattccaccccaggaacggtcatgaactcagcctttgtctcaacgaggggcgtaacatttccttacagtcaagccccatcaactagaagtgcttattacttttaggattaaaaaagtaataacagactttgacttaatactctgtcttttcagaggcaaagtgggtgggtagaggggagctttaaaaatagaagtacaaaacaacatcctggaaacatatgaccccagatggaataatgtcacattccccagtgcagataatgggctgctgctggctctgtggtgtctgtctgcagaagatttgctcagtcaaggaaattcaagtggtgagacctttccaccatgggtggtaagagaaacctgccttcaccaaaatctctgaaggggaaagaagtggagagaaaggtttgcttcacttcggggactgcagtttgagaaataaaagggatacagagatatctgcactttgtagaaagggcaagattatttgcttatatctgaagggaggtgggtggttttgctggatgtttggtctgaaagagttacttttgataaagttaatctaattgtagttatattttctgtgtgcttttttttaattactaagaaaaaaattggtgagttcagtagctttggtattatgagtgcaaatcataatagctccaatgtgaaaaaaaaaatcaaaagtataacttgtcacttaatgttagaaaattgcctaaaatgcagtgtaataaataatctctgtaccaaatagtaatttaaatggggtaattttctgcaaggaaaatgtactgtttttatgtttccaaccctcttgaattaaaataaaaacaacttcttttctaanaaaaaaaaaaaaaaaaaaaaaaaaaaaaaaaaaaaaaaaaaaaaaaaaaaaaaaaaaaaaaaaaaaaaaaaaaaaaaaaaaaaaaaaaaaaaaaaaaaaaaaaaaaaaaatataaaaaaaaaaaacaaactaaaaaaaaaaaaaaacaaaacacaaactatttcctataaaactttctccatatcatttaaaaaaaacctcttcacctccttttcttactctatatctctta

SEQ ID NO: 135 - DNA, 1336 bp, Homo sapiens
cggtgcttatttcctgtaatggacaaacttgatgctaatgtgagttctgaggagggtttcgggtcagtggagaaggtggtgctgctcacgtttctctcgacggttatcctgatggccatcttggggaacctgctggtgatggtggctgtgtgctgggacaggcagctcaggaaaataaaaacaaattatttcattgtatctcttgcttttgcggatctgctggtttcggtgctggtgatgccctttggtgccattgagctggttcaagacatctggatttatggggaggtgttttgtcttgttcggacatctctggacgtcctgctcacaacggcatcgatttttcacctgtgctgcatttctctggataggtattacgccatctgctgccagcctttggtctataggaacaagatgacccctctgcgcatcgcattaatgctgggaggctgctgggtcatccccacgtttatttcttttctccctataatgcaaggctggaataacattggcataattgatttgatagaaaagaggaagttcaaccagaactctaactctacgtactgtgtcttcatggtcaacaagccctacgccatcacctgctctgtggtggccttctacatcccatttctcctcatggtgctggcctattaccgcatctatgtcacagctaaggagcatgcccatcagatccagatgttacaacgggcaggagcctcctccgagagcaggcctcagtcggcagaccagcatagcactcatcgcatgaggacagagaccaaagcagccaagaccctgtgcatcatcatgggttgcttctgcctctgctgggcaccattctttgtcaccaatattgtggatcctttcatagactacactgtccctgggcaggtgtggactgctttcctctggctcggctatatcaattccgggttgaacccttttctctacgccttcttgaataagtcttttagacgtgccttcctcatcatcctctgctgtgatgatgagcgctaccgaagaccttccattctgggccagactgtcccttgttcaaccacaaccattaatggatccacacatgtactaaggtacaccgttctgcacaggggacatcatcaggaactcgagaaactgcccatacacaatgacccagaatccctggaatcatgcttctgattgaggacatggctcacaacttagccattcattcgcattcatgtttgcatgaacaggtcaccctggcatcacttctgaacctcatcaccaccagtgaggcatcaggtagtaggctgagagcccagaggaggtacatggtggacagtgttggccg

SEQ ID NO: 136 - DNA, 1530 bp, Homo sapiens
gacgcggcgcccagcagagtcaggtgcggacgactttgtctgtaggagcagcggcggcttgaggacccggggagaccctcaagaatcgacccatcaggacgccagagctgcttcagcggtgaccaccttctccctctaacacattcttcccttcttcacaaacggcccatgtcagacgaaggctcaagggggagccgcctgcccctggcgctgcccccggcctcccagggttgctcttcagggggcggcggcggcggctcctcggctgggggctcgggcaattcccggcccccacgcaacctccaaggcttgctgcagatggccatcaccgcgggctctgaagagccagaccctcctccagaaccgatgagtgaggagaggcgtcagtggctgcaggaggccatgtcggctgccttccgaggccagcgggaggaggtggagcagatgaagagctgcctccgagtgctgtcacagcccatgccccccactgctggggaggccgagcaggcggccgaccagcaagagcgagagggggccctggagctgctggccgacctgtgtgagaacatggacaatgccgcagacttctgccagctgtctggcatgcacctgctggtgggccggtacctggaggcgggggctgcgggactgcggtggcgggcggcacagctcatcggcacgtgcagtcagaacgtggcagccatccaggagcaggtgctgggcctgggtgccctgcgtaagctgctgcggctgctggaccgcgacgcctgcgacacggtgcgcgtcaaggccctcttcgccatctcctgtctggtccgagagcaggaggctgggctgctgcagttcctccgcctggacggcttctctgtgttgatgagggccatgcagcagcaggtgcagaagctcaaggtcaaatcagcattcctgctgcagaacctgctggtgggccaccctgaacacaaagggaccctgtgctccatggggatggtccagcagctggtggccctggtgcggacagagcacagccccttccacgagcacgtgcttggagccctgtgcagcctggtgacagactttccgcagggtgtgcgcgagtgtcgggagccggaactgggcctggaggagctcctccgccaccgctgtcagctgctgcagcagcatgaggagtaccaggaggagctggagttctgtgaaaagctgctacagacctgtttctccagcccagcggacgacagcatggatcggtgaaaccaggtggcttcttgcccccttctccgtgggaaccccaggcttcttgcctccctccccacctacaaggccctctcccaagggatcgcagggcctaggtgcctggacccagggtgtgccagcccgtctctgtgcagtccctggaaggggcgctgagaaaggcaccagctccttggaccccacctcccatgctctcactctcatccccgttctcttgtccacacagctcttccaataaaggtgtttctcttcctccttctcaagaaaaaaaaaaaaaaaaaa

SEQ ID NO: 137 - DNA, 1658 bp, Homo sapiens
ctctctctctatctctctcagaatgacaattctaggtacaacttttggcatggttttttctttacttcaagtcgtttctggagaaagtggctatgctcaaaatggagacttggaagatgcagaactggatgactactcattctcatgctatagccagttggaagtgaatggatcgcagcattcactgacctgtgcttttgaggacccagatgtcaacaccaccaatctggaatttgaaatatgtggggccctcgtggaggtaaagtgcctgaatttcaggaaactacaagagatatatttcatcgagacaaagaaattcttactgattggaaagagcaatatatgtgtgaaggttggagaaaagagtctaacctgcaaaaaaatagacctaaccactatagttaaacctgaggctccttttgacctgagtgtcatctatcgggaaggagccaatgactttgtggtgacatttaatacatcacacttgcaaaagaagtatgtaaaagttttaatgcatgatgtagcttaccgccaggaaaaggatgaaaacaaatggacgcatgtgaatttatccagcacaaagctgacactcctgcagagaaagctccaaccggcagcaatgtatgagattaaagttcgatccatccctgatcactattttaaaggcttctggagtgaatggagtccaagttattacttcagaactccagagatcaataatagctcaggggagatggatcctatcttactaaccatcagcattttgagttttttctctgtcgctctgttggtcatcttggcctgtgtgttatggaaaaaaaggattaagcctatcgtatggcccagtctccccgatcataagaagactctggaacatctttgtaagaaaccaagaaaaaatttaaatgtgagtttcaatcctgaaagtttcctggactgccagattcatagggtggatgacattcaagctagagatgaagtggaaggttttctgcaagatacgtttcctcagcaactagaagaatctgagaagcagaggcttggaggggatgtgcagagccccaactgcccatctgaggatgtagtcgtcactccagaaagctttggaagagattcatccctcacatgcctggctgggaatgtcagtgcatgtgacgcccctattctctcctcttccaggtccctagactgcagggagagtggcaagaatgggcctcatgtgtaccaggacctcctgcttagccttgggactacaaacagcacgctgccccctccattttctctccaatctggaatcctgacattgaacccagttgctcagggtcagcccattcttacttccctgggatcaaatcaagaagaagcatatgtcaccatgtccagcttctaccaaaaccagtgaagtgtaagaaacccagactgaacttaccgtgagcgacaaagatgatttaaaagggaagtctagagttcctagtctccctcacagcacagagaagacaaaattagcaaaaccccactacacagtctgcaagattctgaaacattgctttgaccactcttcctgagttcagtggcactcaacatgagtcaagagcatcctgcttctaccatgtggatttggtcacaaggtttaaggtgacccaatgattcagctattt

SEQ ID NO: 138 - DNA, 1440 bp, Homo sapiens
gaattccccccccccccccctcacttggtgtgtctatatgtctggcagacattatcagcacattctctgttgttacctgtgattcattttttcttcactctccaggtgaatttcaattgctgaaaatttcccactgaaaatatgcagtaatatattttgtggttcagacatttggggcaaatggttcacattcattttagggttagtggtcatgctgtttatttttctctgctatacaaagttcctcttaggggtctgcctcatgacactaaaaaatgaatagagattctactgtaggttatctcctaggcttgagttcaacatttgtttggatttttgaagaaagtcaaatcaagcaatgctcccaaatgatgtctttgtaaattcataccctctggccctattttttttcatagaccctaactctacctttctgctttaaagcaaagtaaactcggtggcctcttcttctccacccctcaaaatgatagcaatctctgccgtcagcagtgcactcctgttctcccttctctgtgaagcaagtaccgtcgtcctactcaattccactgactcatccccgccaaccaataatttcactgatattgaagcagctctgaaagcacaattagattcagcggatatccccaaagccaggcggaagcgctacatttcgcagaatgacatgatcgccattcttgattatcataatcaagttcggggcaaagtgttcccaccggcagcaaatatggaatatatggtttgggatgaaaatcttgcaaaatcggcagaggcttgggcggctacttgcatttgggaccatggaccttcttacttactgagatttttgggccaaaatctatctgtacgcactggaagatatcgctctattctccagttggtcaagccatggtatgatgaagtgaaagattatgcttttccatatccccaggattgcaaccccagatgtcctatgagatgttttggtcccatgtgcacacattatacgcagatggtttgggccacttccaatcggataggatgcgcaattcatacttgccaaaacatgaatgtttggggatctgtgtggcgacgtgcagtttacttggtatgcaactatgccccaaagggcaattggattggagaagcaccatataaagtaggggtaccatgttcatcttgtcctccaagttatgggggatcttgtactgacaatctgtgttttccaggagttacgtcaaactacctgtactggtttaaataagtttaccttttcctccaggaaatataatgatttctgggaacatgggcatgtatatatatatatggagagagaattttgcacatattatacatattttgtgctaatcttgttttcctcttagtattcctttgtataaattagtgtttgtctagcatgtttgtttaatcctttgggaattc

SEQ ID NO: 139 - DNA, 342 bp, Homo sapiens
atgagcccaatattcacctgcatcacaatcctttgtctgctggctgcaggttctcctggtgaagaagtcgcccagactccaaaacatcttgtcagaggggaaggacagaaagcaaaattatattgtgccccaataaaaggacacagttaggttttttggtaccaacaggtcctgaaaaacgagttcaagttcttgatttccttccagaatgaaaatgtctttgatgaaacaggtatgcccaaggaaagattttcagctaagtgcctcccaaattcaccctgtagccttgagatccaggctacgaagcttgaggattcagcagtgtatttttgtgccagcagc

SEQ ID NO: 140 - DNA, 538 bp, Homo sapiens
ccctgagcagagggacctgcacacagagactccctcctgggctcctggcaccatggccccactgaagatgctggccctggtcaccctcctcctgggggcttctctgcagcacatccacgcagctcgagggaccaatgtgggccgggagtgctgcctggagtacttcaagggagccattccccttagaaagctgaagacgtggtaccagacatctgaggactgctccagggatgccatcgtttttgtaactgtgcagggcagggccatctgttcggaccccaacaacaagagagtgaagaatgcagttaaatacctgcaaagccttgagaggtcttgaagcctcctcaccccagactcctgactgtctcccgggactacctgggacctccaccgttggtgttcaccgcccccaccctgagcgcctgggtccaggggaggccttccagggacgaagaagagccacagtgagggagatcccatccccttgtctgaactggagccatgggcacaaagggcccagattaaagtctttatcctc

SEQ ID NO: 141 - DNA, 4567 bp, Homo sapiens
actgctgacacgtgtgcgcgcgcgcggctccactgccgggcgaccgcgggaaaattccaaaaaaactcaaaaagccaatacgaggcaaagccaaattttcaagccacagatcccgggcggtggcttcctttccgccactgcccaaactgctgaagcagctcccgcgaggaccacccgatttaatgtgtgccgaccatttccttcagtgctggacaggctgctgtgaagggacatcaccttttcgctttttccaagatggctcaagattcagtagatctttcttgtgattatcagttttggatgcagaagctttctgtatgggatcaggcttccactttggaaacccagcaagacacctgtcttcacgtggctcagttccaggagttcctaaggaagatgtatgaagccttgaaagagatggattctaatacagtcattgaaagattccccacaattggtcaactgttggcaaaagcttgttggaatccttttattttagcatatgatgaaagccaaaaaattctaatatggtgcttatgttgtctaattaacaaagaaccacagaattctggacaatcaaaacttaactcctggatacagggtgtattatctcatatactttcagcactcagatttgataaagaagttgctcttttcactcaaggtcttgggtatgcacctatagattactatcctggtttgcttaaaaatatggttttatcattagcgtctgaactcagagagaatcatcttaatggatttaacactcaaaggcgaatggctcccgagcgagtggcgtccctgtcacgagtttgtgtcccacttattaccctgacagatgttgaccccctggtggaggctctcctcatctgtcatggacgtgaacctcaggaaatcctccagccagagttctttgaggctgtaaacgaggccattttgctgaagaagatttctctccccatgtcagctgtagtctgcctctggcttcggcaccttcccagccttgaaaaagcaatgctgcatctttttgaaaagctaatctccagtgagagaaattgtctgagaaggatcgaatgctttataaaagattcatcgctgcctcaagcagcctgccaccctgccatattccgggttgttgatgagatgttcaggtgtgcactcctggaaaccgatggggccctggaaatcatagccactattcaggtgtttacgcagtgctttgtagaagctctggagaaagcaagcaagcagctgcggtttgcactcaagacctactttccttacacttctccatctcttgccatggtgctgctgcaagaccctcaagatatccctcggggacactggctccagacactgaagcatatttctgaactgctcagagaagcagttgaagaccagactcatgggtcctgcggaggtccctttgagagctggttcctgttcattcacttcggaggatgggctgagatggtggcagagcaattactgatgtcggcagccgaaccccccacggccctgctgtggctcttggccttctactacggcccccgtgatgggaggcagagagcacagactatggtccaggtgaaggccgtgctgggccacctcctggcaatgtccagaagcagcagcctctcagcccaggacctgcagacggtagcaggacagggcacagacacagacctcagagctcctgcacaacagctgatcaggcaccttctcctcaacttcctgctctgggctcctggaggccacacgatcgcctgggatgtcatcaccctgatggctcacactgctgagataactcacgagatcattggctttcttgaccagaccttgtacagatggaatcgtcttggcattgaaagccctagatcagaaaaactggcccgagagctccttaaagagctgcgaactcaagtctagaaggcacgcaggccgtgtgggtgcccggcgtgagggatcaggctcgccagggccacaggacaggtgatgacctgtggccacgcatttgtggagtaagtgccctcgctgggctgtgagaatgagctgtacacatcttgggacaatctgctagtatctattttacaaaatgcagagccaggtccctcagcccagactcagtcagacatgttcactaatgactcaagtgagcttcggtactcctggtgcccgcccggccagaccgtcagcttgataattactaaagcaaaggcctgggtgggagaacaggtttctagtttttacccaagtcaagctgcacatctattatttaaaaattcaaagtcttagaaccaagaatttggtcatgaaccattaaagaatttagagagaacttagctctttttagactctttttaggagtcagggatctgggataaagccacactgtcttgctgtatggagaaattcttcaaggggagtcagggtccctcaggcttcccttgtgtctccctggacctgcctgacaggccacaggagcagacagcacacccaagcccgggcctccggcacactctttccactctgtatttgctaaatgatgctaactgctaccaaaaggcccttgggacatcagaggagccggcagcgaaggtagaggatgtgttccagaaacattagaaggcaggattaattcagttagttagtctcttgttaaatggaaatgggaattggaaattcctgataaagaattggcctggctgggtgcagtggctcacacctgtgatcccagcactttgggaggccaaggcagggggattacttcagcccaggagttccagactgcctggctaacatggcaataccctatctctactaaaaatacaaaaattatcggggtgcaatggcatgcatctgtaacccagctattcaagaggctgaggcatgaggatctcttgaacccgggaggtgggagttgtagtgagccgagatcatgacactgcactccagcctgggcaacagagcgagaccatctcttaaaaaaaggcattgttagtgtaactcaaggttaacatttatttcatgtcagtacagggtgctttttcctttcagggacattctggaattgtattggttgtacattcttttgtgtctattctgtttgtcaagtgagtcaagacttgcttttgtccattttgatttgtgtgtattagtctgagtcttggctccgttttgaggtatgagcaaagttttgctggatagagttaacctttagggaaattccttattttggtatgtggcaatgctaatagatccactgaagatctggaaaattccaggaactttttcacctgagcctttcttctgagaaatgctgcagtcagaagggtgtgctggtaaagtattttggtggcagctgccatcatggtcattgccttcatataacatgcttcgtgctcatggtcattgccttcatataacatgcttcgtgccatcatgatccttgccttcatataacaaacatgcttcgtcagaggtgttggggttgaaaaaggagctgcatgcttcactggagttgagggcctctcctgtctgactttaagccagaacttgtggctgggccatggaagctgtgactcctctgtggacatggtggcagcagggaacccctagagagaggggccactgggaccaggcctcctgttgtggagggactcctgggacagtcctccaccctgtcctgtggtcctgtgtacagggttggcctcttcctcctcccctgccaggcctctgcccatgccccttccttccttctcctgggactggtgaagctaggcatctggaagacttcttcctagcctggaagccctgacctcggcccatctgcagaatctcccagttccttcacagctgccgagtcctctcacgggtgcggtggaggcggccttgcggtggtgctttctgggcagccaggggttcctgggtgggaggactgtccctctggggacgtggcactgaagtgcctgctggcttcatgtggccctttgccctttcccagcctgagagatgctcaaaggtggggagctgggggagccacccctcggccattccctccacctccaagacaggtggcggccgggcaggcactcttaagcccacctccccctcttgttgccttcgatttcggcaaagcctgggcaggtgccaccgggaaggaatggcatcgagatgctgggcggggacgcggcgtggcgagggggcttgacggcgttggcggggctgggcacaggggcagccgcagggaggcagggatggcaaggcgtgaagccaccctggaaggaactggaccaaggtcttcagaggtgcgacagggtctggaatctgaccttactctagcaggagtttttgtagactctccctgatagtttagtttttgataaagcatgctggtaaaaccactaccctcagagagagccaaaaatacagaagaggcggagagcgcccctccaaccaggctgttattcccctggactccgtgacatctgtggaattttttagctctttaaaatctgtaatttgttgtctattttttcattctaaataaaacttcagtttgcaccta

SEQ ID NO: 142 - DNA, 2219 bp, Homo sapiens
cccatttcaggtgggacttgtggcataggagaggtcttgggactggtgcccagcctggtgcagtcccctcccaaagcctccctctcccacacagccgtgagagcctgtgggcctagaggactcagctggcaggttgcagggaggcgcagccttttgcaatcccccagggccacaggttaccctccttctctctctagacccccagctctaccaggagatccaggagcggggcctgaacaccagccaggagtctgatgacgacatcctcgatgagtcctccagccccgagggaacccagaaggtggacgccaccattgtggtcaagagctaccggcccgcccaggtcacctggagccagctcccggaggtggtggaattgggcatcctggaccagctctccactgaggagcggaaaaggcagagggccatgttcgagatcctcacgtcggagttctcctaccagcacagcctgagcatcctggtggaggagttcctgcagtccaaggagctgcgggcgaccgtgacccagatggagcaccaccacctcttctccaacatcctggatgtcctgggtgccagtcagaggttcttcgaggacctggagcagcggcacaaggcccaggtgctggtcgaggacatcagtgacatcctggaggagcacgctgagaagtacttccacccctacatcgcctactgctccaacgaggtctaccaacagcgcacgctgcagaagctgataagcagcaacgccgccttccgagaggccctgagagagattgagaggcggccggcgtgcgggggcctgcccatgctctccttcctgatcctccccatgcagcgggtgacccggctgcccctcctgatggatacgctctgcctcaagacccagggccactccgaaaggtacaaggctgccagccgtgcactgaaggccatcagcaagctggtgaggcagtgcaacgagggggcccacaggatggagcgcatggagcagatgtacacgctgcacacacagctggacttcagcaaggtcaagtccctcccactgatctccgcctcccggtggctgctgaagcgcggagagctgttcttagtggaagaaaccggactttttcgaaaaattgccagccggccaacgtgctaccttttcctgttcaacgatgtcctggttgtgaccaagaagaagagcgaggagagctacatggtccaggactacgcccagatgaaccacatccaggtagagaagatagagccgtctgagctccctctgcccgggggcggcaaccgtagctcctccgtgccccaccccttccaggtgaccctgcttcgcaacagcgagggccgccaggagcagctcctgctctcctcggactccgcgagtgaccgggcacggtggatcgtggcgctcacacacagtgagagacagtggcagggcctctccagcaaaggagacctgccccaggtggagatcaccaaggccttcttcgcgaagcaagcagacgaggtcacactgcagcaggcggacgtggtcctggttctgcagcaggaggatgggtggctctatggcgagaggctccgggacggagagacgggatggttccccgaggactttgcccgcttcatcaccagccgtgtggccgtggagggcaatgtccgcaggatggagcgtctgcgggtggagacggacgtgtaggcctggcgaggccagccggcggcagcacagcctgtccccaatcagcaagtggtcgtgcctggctctagagagcgtggggagctggtctcaaggacccagcatggttccctggggcttcccaagagcctgtggctgtggtgccgggctccagacacttcacggaaggaagatcacatgtccccagagaggcacccccaggcaagctcgagggggccacaccgtgtcccagggagcccagcctattcccgttggctggctgggcccctctcagctgctgggccccacctccccactgcacccaggggacaactccacctggactgatgggcacaggaggcaccaatagcgattattgggggcaatgcgaggtctcctcctatgcccttcctacccctgagtgggacaagaagggccttgagtgcccaggagtgccccacgttctgagaaggggccggccggagggaggggacccggcagggagatttcggttttgaggtttctaaatacattaaagttatttcttaag

SEQ ID NO: 143 - DNA, 1460 bp, Homo sapiens
gcacacgggaagatatcagaaacatcctaggatcaggacaccccagatcttctcaactggaaccacgaaggctgtttcttccacacagcactttgatctccatttaagcaggcacctctgtcctgcgttccggagctgcgttcccgatggtcctcctttggctcacgctgctcctgatcgccctgccctgtctcctgcaaacgaaggaagatccaaacccaccaatcacgaacctaaggatgaaagcaaaggctcagcagttgacctgggaccttaacagaaatgtgaccgatatcgagtgtgttaaagatgccgactattctatgccggcagtgaacaatagctattgccagtttggagcaatttccttatgtgaagtgaccaactacaccgtccgagtggccaacccaccattctccacgtggatcctcttccctgagaacagtgggaagccttgggcaggtgcggagaatctgacctgctggattcatgacgtggatttcttgagctgcagctgggcggtaggcccgggggcccccgcggacgtccagtacgacctgtacttgaacgttgccaacaggcgtcaacagtacgagtgtcttcactacaaaacggatgctcagggaacacgtatcgggtgtcgtttcgatgacatctctcgactctccagcggttctcaaagttcccacatcctggtgcggggcaggagcgcagccttcggtatcccctgcacagataagtttgtcgtcttttcacagattgagatattaactccacccaacatgactgcaaagtgtaataagacacattcctttatgcactggaaaatgagaagtcatttcaatcgcaaatttcgctatgagcttcagatacaaaagagaatgcagcctgtaatcacagaacaggtcagagacagaacctccttccagctactcaatcctggaacgtacacagtacaaataagagcccgggaaagagtgtatgaattcttgagcgcctggagcaccccccagcgcttcgagtgcgaccaggaggagggcgcaaacacacgtgcctggcggacgtcgctgctgatcgcgctggggacgctgctggccctggtctgtgtcttcgtgatctgcagaaggtatctggtgatgcagagactctttccccgcatccctcacatgaaagaccccatcggtgacagcttccaaaacgacaagctggtggtctgggaggcgggcaaagccggcctggaggagtgtctggtgactgaagtacaggtcgtgcagaaaacttgagactggggttcagggcttgtgggggtctgcctcaatctccctggccgggccaggcgcctgcacagactggctgctggacctgcgcacgcagcccaggaatggacattcctaacgggtggtgggcatgggagatgcctgtgtaatttcgtccgaagctgccaggaagaagaacagaac

SEQ ID NO: 144 - DNA, 4345 bp, Homo sapiens
cggcgtgtgaatccagggcctgaaaacccagaatgaacttgtgtccatcccagagatcactgcagatgtcatgaggtaccctttgtgtcaccagctcaagcaggcctctggccactttatcatctgtggtggtcctgtcccgtgaccaggaggaaaaattagctctttgaagagaaagtagttctctattgcaggcactggcctcttaaattgttgcaggtggggaatggatgagaatatttgttttgggtgatcagaactgagactcctattgtggattagtaacatgcctcctcctagaacaagggagggcagggatcgccgagaccaccaccgggctcccagcgaggaagaggccttggagaaatgggactggaattgtccagagacgcgtcgcctcttggaagatgccttcttccgtgaagaggattacatccgtcagggttctgaggaatgtcagaagttttggaccttctttgaacgcctgcagagattccagaatctcaagacctccaggaaggaggagaaagaccctggacagcccaagcacagcatcccagcgctggccgacctacctcgcacttacgacccacgttaccgcatcaacctctctgttcttggccctgccacgcggggctctcagggactgggcaggcacttgcccgcggagagagtggctgagttccgccgagccctgttgcactacctggactttggccagaagcaggcatttgggcgtctggccaagctgcagcgtgagcgggcagccctccccatcgcccagtatgggaaccgcatcctgcagacgctgaaggagcaccaggtggtggtagtggccggtgacaccggctgtggcaagtccactcaggtgccccagtacctgctggctgctggcttcagtcatgtggcgtgcacccagccccggcggatcgcctgcatctcactggccaagcgtgtgggctttgagagcctcagtcagtatggctcacaggtcggctaccagatccgctttgagagcacacgttcggcggccaccaagattgtattcctgacagtggggctgctcctgcgacaaatccagcgggaacccagcctgccccagtatgaggtcctgattgtggatgaagtccatgagcggcatctccacaacgatttcctcctgggcgtcctccagcgcctgttgcccacgcggcctgacctcaaggtcatcctcatgtcggccaccatcaacatctcgctcttctccagctatttcagcaatgcccctgtggtacaggtgcctgggaggctgttccccatcacggtatttgatgtggcaccccctggagtccggaaatgcatcctctccaccaacattgctgagacctcagtcaccattgacgggatccgcttcgtagtagattccggaaaggtgaaggagatgagctacgatccgcaggccaagctgcaacggctgcaggagttctggattagtcaggccagcgcagagcagcggaagggccgggcgggccgcacgggccccggagtctgcttccgcctctatgccgaatcggactatgatgccttcgccccctaccccgtcccagaaattcggagggtggccctggactcgttggtgctgcagatgaagagcatgagtgtgggggacccccgaaccttccccttcatcgagcccccaccaccagccagcctggaaaccgccatcctctacctccgggaccagggggccctggacagctcagaggccctcacacccattgggtccctgctagcccagctgcctgtggacgttgtgattgggaagatgctgatcctgggctccatgttcagcctggtggagcctgtgctcaccatcgcagccgcacttagcgtccagtcgcccttcacccgcagcgcccagagcagcccagagtgctgcaccccacctgcgtcttcgctggcagccccgaggtgctgcacgcacaggagctggaggccagcaactgcgacggaagccgagacgacaaggacaagatgagcagcaaacaccagctcctcagcttcgtgtccctgctggagaccaacaagccgtacctggtgaactgcgtccgcatccctgccctccagtccctcctgctttttagccggtctttggacaccaatggtgactgctcccgcctggtggccgatggctggctggagctgcagctagcagacagtgaaagtgccatccgactcctggcggcttccctgcggctccgtgcccgctgggaaagtgccctggaccggcagctggcgcaccaggcccagcagcagctggaggaggaggaggaggatacgccagtcagccccaaggaggtggccaccctgagcaaggaactcctgcaattcacggcatccaagattccttacagcctccggcggctcacagggctagaagtccagaacatgtatgtgggaccccagaccatcccagccaccccccatcttcctggcctctttggcagctccaccctgtccccccaccccacaaaggggggctacgcagtcactgacttcctcacctacaactgcctcacgaatgacacagacctgtacagcgactgtctccgaaccttctggacctgcccccactgtggcctgcatgcgcccctcacgcccctggagcgcatcgcccatgagaacacctgcccccaggccccacaggatgggcccccaggggctgaggaagctgccctcgaaaccctccagaagacatctgtcctgcagaggccctaccactgcgaggcctgcgggaaggacttcctctttacacccacagaggtgctgcgccaccggaagcagcacgtgtgagctgggccaggagccctgcccacctccgtgcagctgacctgccctccagcccaggactaggggcaggactcttgcctgaacccccagcctgggcttagccctgtggtcctgtcccagtgcagagggcctggagcacggattgtgaataaagcctcacatgctgatacacactgttaggcctgcacctgcccatccagaaagcagcagctgccttgttagtcctccccagggtctagctttccttcttcctgctgcagggtgctgcctgaggggtcctgggtaggaggggcgttagagccagcagggacctcccatgtctccagattccaggtgcaggttcttagcacctccgcagccgctctctcttgagtccatcctcagtctctcctaccccttgaagtagggggaccctgaatttgcccatccacctgggtcactttgagagttgtgcaggggggctgggagcactggtgttcacgtgggaccacaggctgcaccataagacccactcacaataaaaaaataaaaggccgagccgggcatggttgctcactcccgtaataaaaaaataaaagaacatgctgggattacaggcgtgagccactgcacccggccgtgaccaacattcttaatctgtcctctagtgctggccactctaaaacttcacaagaatgtgctgtctgtgtctagcttcttttacccaacatgaggttgcatgggcttggttcattcattctgttccatgaattcatcacaatatatccattcttttgtccaggggcatttggcttccagaaacctacccctaacaccagcccttccctccctctgcagaacaaaggccccatcagaggggacgtgctgggtgtcagcgtcagcttctgggaggaggaaggtcagagctaaggcctgaaggatgatgaggtatcaggtgggtggaggggagacgctcaggaggtgggaaaggcggaggtgcacaggcttggttccaggtacaaataacgttactaggagcacacagtacctggattttgatgaatacattgtacatttctgtcctgtatgtatccagggttataggacgtgattataggacacgcatatatgtttggttttagtggactcttaaaaattgttttccaggggccgggcacagtggcttacgcctgtaatcccagcactttgggaggcctaggcgggcagatcacctgaggtcaggagttcaagatcagcctgaccaacatggagaaaccccgtctctattgggaggccgaggcgggaggatcacaaagtcaggagatcgagaccatcctggctaacacggtgaaaccccgtctctactaaaaatgcaaaaaaattggctgggcgtggtggcgggcgcctgtggtcccagctactcgggaggctgaggcaggagaatggagtgagcccgggaggcagagcttgcagtgagccaagatcgtgccactgcactccagcctggttgacagagcaagactccgtctcaaaaaag

SEQ ID NO: 145 - DNA, 3394 bp, Homo sapiens
  misc_feature (3200)..(3200): n is a, c, g, or t
acatagagataaagggaatgaactataaagacactggcatctctgtttcccacaaatcaagacattcatgaaattaatgactaacttacaatgaattttttagaggtgtgtctcataaggaaaaacctggatgatatgggaccccgcaggtgattgggggcgtagcctggagtgagggtttggctggtgtagcttggagtgaggccccctggcgtggagtcttgaggcctgctgagggcgtgagatggcatgaggcgaagagagggccatggcaccgactccgagatgggtcaaggacccgtacgggagtcgcaatcctcagaccctcccgcgctccagttccggataagcgagtataagccgctgaacatggcgggagtggagcagcccccgagccccgagctgcggcaggaaggcgtgaccgaatacgaagatggcggggccccggcgggagatggcgaggcgggcccccaacaggcggaggaccacccccagaatcctccagaagatcccaatcaggaccccccagaggatgatagcacctgtcagtgccaggcgtgcgggcctcaccaagccgcgggtccagatcttggttcctctaatgatggctgccctcagctgttccaggagcggtcagtcatagtggagaactcctcaggctctaccagcgcttctgagctcctcaaacccatgaagaagaggaagcgcagggaataccagagcccatcagaggaggagtcggagccagaggccatggagaagcaagaagaaggaaaggacccagagggacaacccactgctagcaccccagagagtgaggagtggagcagcagccagcctgcaacaggtgagaagaaggaatgctggtcgtgggagtcctacctagaggagcagaaggccattactgctccagtcagcctcttccaggactcccaggcagtcactcacaacaagaatggcttcaaactgggcatgaagttggaaggcattgaccctcaacacccgtccatgtacttcatcctcaccgtggctgaggtatgtggctatcgcctacgcctgcactttgatgggtattctgagtgccatgacttctgggtcaatgccaactcccctgacattcaccctgctggctggttcgagaagacgggccacaagctgcagcttcccaaaggttacaaggaggaggagttcagctggagccagtacatgtgcagcacaagagctcaggctgcccccaagcacatgtttgtgagccagagccacagtcccccacccttgggcttccaggtgggcatgaagctggaggctgttgaccgcatgaacccgtcccttgtctgcgtggccagtgtgaccgatgtggtggacagccgcttcctggtgcactttgacaactgggatgatacttatgactactggtgtgatcccagcagcccctacatccacccagtgggctggtgccagaagcaaggaaagcccctcacccctccacaagactacccagaccctgataacttctgttgggagaaatatctggaagaaactggggcctctgctgtccccacctgggccttcaaggtgcgaccccctcacagcttcctggtcaatatgaagctggaggctgtggaccgcaggaacccagccctgattcgcgtggccagcgtggaggatgtggaggaccatcggataaagatccactttgatggctggagtcatggctatgatttctggatcgacgctgatcacccagacatccaccctgccggctggtgctccaagacaggacatcccctgcagcctcctctcggacccagagagcccagctctgcctcccctgggggctgtccccctctcagctataggagcctgccccacactaggacctccaaatacagctttcaccaccggaagtgccccactcctggttgcgacggctctggccatgtcacaggcaagttcacagctcaccattgcctctcaggctgcccactggctgagaggaaccagagccggctgaaagcggagctgtctgacccggaggcctcagcccgcaagaagaacctctcaggcttctccccaaggaagaagcctcgccatcacggccgaattggacgccctccgaagtatcgaaagattccgcaggaagatttccagaccctcacgcccgatgtcgtgcaccagtccctcttcatgtcagccctgtcggcccaccctgaccgctcactctcagtgtgctgggagcagcactgcaagctcctgccaggagtagcgggcatctcagcctcgacagtcgccaagtggaccatcgatgaggtcttcggctttgttcagaccctgacaggttgtgaggaccaagcacgcctcttcaaagacgaggcaagaatagtcagagtgacccatgtatctgggaagactctagtctggactgtggcccagcttggggaccttgtgtgctcagatcatcttcaggaaggaaaaggcatcctggagacaggagtccattcactcctctgctctctacccactcatttgcttgccaaacttagctttgccagtgatagtcaatattaaagtgtacttttttcccctttaatccaatatagttgataattaaagtgtattttgaatgacacagatattgtgatttactgcaaggatcctaacacacacttaaaatcaagagccaaggagtagtgagttgtagataaaaaaagaatgtcagctttggagacagtctgggtttaaatcccagttctgtcaatttgagctgtttactgtctctgagcctacatcttcttgtctgtaaaatggagataaaatgggtttaatgaggtctaccttgcagagccattgtgagcattggaaatgatgaatgaatcataccagaacgtctagtataattacagtcatgcattgcttaacgatggggatacattcttagaaatgtgtcactaggcaattctgtcattgtgtaaacattataggatgtacttacacaaacctagatgttatatgtatttttatttacatgtatattttcacatgaaataccaaatgtcacagcattattactgaatgtcagtcatttcccctacttgatctgcaatgccaatatcaagggccatgtatcaggtttctgtatatgttccactataatcttatgggaccatggttttaaatgtggaatcattgacagaaatgtntttatgtagcatatggctgtgtatcactagtatataatagagcaatattatggaggaatatgtagatccaatcactttacctatacaaaatgactgctatggtgggaacacaataaacaccagttttgacttttaaaaaaaaaaaaaacaaaaaaaaaaaaaaaaagcggccgctgaattcacctgcccgggcg

SEQ ID NO: 146 - DNA, 1922 bp, Homo sapiens
ggagagtctgaccaccatgccacctcctcgcctcctcttcttcctcctcttcctcacccccatggaagtcaggcccgaggaacctctagtggtgaaggtggaagagggagataacgctgtgctgcagtgcctcaaggggacctcagatggccccactcagcagctgacctggtctcgggagtccccgcttaaacccttcttaaaactcagcctggggctgccaggcctgggaatccacatgaggcccctggccatctggcttttcatcttcaacgtctctcaacagatggggggcttctacctgtgccagccggggcccccctctgagaaggcctggcagcctggctggacagtcaatgtggagggcagcggggagctgttccggtggaatgtttcggacctaggtggcctgggctgtggcctgaagaacaggtcctcagagggccccagctccccttccgggaagctcatgagccccaagctgtatgtgtgggccaaagaccgccctgagatctgggagggagagcctccgtgtgtcccaccgagggacagcctgaaccagagcctcagccaggacctcaccatggcccctggctccacactctggctgtcctgtggggtaccccctgactctgtgtccaggggccccctctcctggacccatgtgcaccccaaggggcctaagtcattgctgagcctagagctgaaggacgatcgcccggccagagatatgtgggtaatggagacgggtctgttgttgccccgggccacagctcaagacgctggaaagtattattgtcaccgtggcaacctgaccatgtcattccacctggagatcactgctcggccagtactatggcactggctgctgaggactggtggctggaaggtctcagctgtgactttggcttatctgatcttctgcctgtgttcccttgtgggcattcttcatcttcaaagagccctggtcctgaggaggaaaagaaagcgaatgactgaccccaccaggagattcttcaaagtgacgcctcccccaggaagcgggccccagaaccagtacgggaacgtgctgtctctccccacacccacctcaggcctcggacgcgcccagcgttgggccgcaggcctggggggcactgccccgtcttatggaaacccgagcagcgacgtccaggcggatggagccttggggtcccggagccgccgggagtgggcccagaagaagaggaaggggagggctatgaggaacctgacagtgaggaggactccgagttctatgagaacgactccaaccttgggcaggaccagctctcccaggatggcagcggctacgagaaccctgaggatgagcccctgggtcctgaggatgaagactccttctccaacgctgagtcttatgagaacgaggatgaagagctgacccagccggtcgccaggacaatggacttcctgagccctcatgggtcagcctgggaccccagccgggaagcaacctccctggggtcccagtcctatgaggatatgagaggaatcctgtatgcagccccccagctccgctccattcggggccagcctggacccaatcatgaggaagatgcagactcttatgagaacatggataatcccgatgggccagacccagcctggggaggagggggccgcatgggcacctggagcaccaggtgatcctcaggtggccagcctggatctcctcaagtccccaagattcacacctgactctgaaatctgaagacctcgagcagatgatgccaacctctggagcaatgttgcttaggatgtgtgcatgtgtgtaagtgtgtgtgtgtgtgtgtgtgtgtgtgtgtgtgtatacatgccagtgacacttccagtcccctttgtattccttaaataaactcaatgagctcttccaaaaaaaaaaa

SEQ ID NO: 147 - DNA, 1508 bp, Homo sapiens
  misc_feature (5)..(5): n is a, c, g, or t
  misc_feature (22)..(22): n is a, c, g, or t
  misc_feature (761)..(761): n is a, c, g, or t
  misc_feature (1068)..(1068): n is a, c, g, or t
  misc_feature (1471)..(1473): n is a, c, g, or t
  misc_feature (1491)..(1499): n is a, c, g, or t
  misc_feature (1501)..(1503): n is a, c, g, or t
  misc_feature (1506)..(1506): n is a, c, g, or t
ggggnggcgcgcgggcccggcnaaggcaagcgccggtggggcggcggcgccagagctgctggagcgctcggggtccccgggcggcggcggcggcgcagaggaggaggcaggcggcggccccggtggctcccccccggacggtgcgcggcccggcccgtctcgcgaactcgcggtggtcgcgcggccccgcgctgctccgaccccgggcccctccgccgccgccatggctcggccgctagtgcccagctcgcagaaggcgctgctgctggagctcaaggggctgcaggaagagccggtcgagggattccgcgtgacactggtggacgagggcgatctatacaactgggaggtggccatcttcgggccccccaacacctactacgagggcggctacttcaaggcgcgcctcaagttccccatcgactacccatactctccaccagcctttcggttcctgaccaagatgtggcaccctaacatctacgagacgggggacgtgtgtatctccatcctccacccgccggtggacgacccccagagcggggagctgccctcagagaggtggaaccccacgcagaacgtcaggaccattctcctgagtgtgatctccctcctgaacgagcccaacaccttctcgcccgcaaacgtggacgcctccgtgatgtacaggaagtggaaagagagcaaggggaaggatcgggagtacacagacatcatccggaagcaggtcctggggaccaaggtggacgcggagcgtgacnggcgtgaaggtgcccaccacgctggccgagtactgcgtgaagaccaaggcgccggcgcccgacgagggctcagacctcttctacgacgactactacgaggacggcgaggtggaggaggaggccgacagctgcttcggggacgatgaggatgactctggcacggaggagtcctgacaccaccagaataaacttgccgagtttacctcactagggccggacccgtggctccttagacgacagactacctcacggaggttttgtgctggtccccgtctcctctggttgtttcgttttggctttttctccntccccatgtctgttctgggttttcacgtgcttcagagaagaggggctgccccaccgccactcacgtcactcggggctcggtggacgggcccagggtgggagcggccggcccacctgtcccctcgggaggggagctgagcccgacttctaccggggtcccccagcttccggactggccgcaccccggaggagccacgggggcgctgctgggaacgtgggcggggggccgtttcctgacactaccagcctgggaggcccaggtgtagcggtccgaggggcccggtcctgcctgtcagctccaggtcctggagccacgtccagcacagagtggacggattcaccgtggccgactcttttccctgctttggtttgtttgaaatctaaataaaactactttatgagannnaaaaaaaaaaaaaaaaannnnnnnnnannnagnac

SEQ ID NO: 148 - DNA, 1481 bp, Homo sapiens
acattataactagtaggggatcctcaccgaccatggccacagctgcctcgaatccctacagcattctcagttccacctccctagtccatgcggactctgcgggcatgcagcaggggagtcctttccgcaaccctcagaaacttctccaaagtgattacttgcagggagttcccagcaatgggcatcccctcgggcatcactgggtgaccagtctgagcgacgggggcccatggtcctccacactggccaccagccccctggaccagcaggacgtgaagcccgggcgcgaagacctgcaactgggtgcgatcatccatcaccgctcgccacacgtagcccaccactcaccgcacactaaccaccccaacgcctggggggccagcccggcaccgaacccgtctatcacgtcaagcggccaacccctcaacgtgtactcgcagcctggcttcaccgtgagcggcatgctggaacacgggggactcaccccacctccagctgccgcctctgcacagagcctgcacccggtgctccgagagcccccggatcacggcgaactgggctcgcaccattgccaggatcactccgacgaggagacgccaacctctgatgagttggaacagttcgccaaacaattcaaacaaagaagaatcaagttgggcttcacgcaggccgacgtggggttggcgctgggcacactgtatggtaacgtgttctcgcagaccaccatctgcaggttcgaggccttgcagctgagcttcaaaaatatgtgcaagctgaagcccctgctgaacaagtggctggaggaggcggattcgtccacagggagcccgaccagcattgacaagatcgctgcacagggccgcaagcgcaagaagcggacctccatcgaggtgagtgtcaagggcgtactggagacgcatttcctcaagtgtcccaagcctgccgcgcaggagatctcctcgctggcagacagcctccagttggagaaggaagtggtgcgtgtctggttctgtaatcgaagacaaaaagagaaaagaatgactccgccaggggatcagcagccgcatgaggtttattcgcacaccgtgaaaacagacacatcttgccatgatctctgactggaggaagcgaggaggcggccggccgcactgggagcagcgcgggatttcctttctctctcactctctttcctttcattctagtattcttaattatttatttttctctctctctcgttcgctcgctctctcgtactctctctcttttcctcctttcctttttctttccctttcccctttttctttcccttctttttccctttcctttcctttcattttctttcctttccccttcccttcccttcccttccatctcttcctttcctttccctttcttttcttttgctttcctttcctttttttcccttttctttccttttcataagaggttctaacttctgttgacaaaggaaacacatactc

SEQ ID NO: 149 - DNA, 1823 bp, Homo sapiens
gaattccgcgcttgtggagctggtggcggcgctccgcaggggctcggctgttttccgcgcggcaggcgcggccatggcgcagctgggaaagctgctcaaggagcagaagtacgaccggcagctgaggttgtggggtgatcatgggcaagaggctttagaatctgctcatgtttgcctaataaatgcaacagccacaggaactgaaattcttaaaaacttggtactaccaggtattggttcgtttacaattattgatggaaatcaggtcagcggagaagatgctggaaacaatttcttccttcaaagaagcagtatcggcaagaaccgagctgaagctgccatggaattcttacaagaattaaatagcgatgtctctggaagttttgtggaagagagtccagaaaaccttctagacaatgatccctcatttttctgtaggtttactgttgtagttgcaactcagcttcctgaaagcacttcactacgcttagcagatgtcctctggaattcccagattcctcttttgatctgtaggacatatggactagttggttatatgaggatcattataaaagaacatccagtaatagaatctcatccagataatgcattagaggatctacgactagataagccatttcctgaactgagagaacattttcagtcctatgatttggatcatatggaaaaaaaggaccacagtcatactccatggattgtgatcatagctaaatatttagcacagtggtatagtgaaacaaatggacgaatacctaaaacgtataaagaaaaagaggacttcagagatttgattagacaaggaattctaaaaaatgaaaatggggctccagaagatgaagagaattttgaagaagctattaaaaatgtgaacacagcactaaatacaactcagatcccaagcagtattgaagatatatttaatgatgatcgctgcataaatatcaccaaacagactccatcattttggattttagctcgtgccttaaaggaatttgtggccaaagagggtcaaggaaatttacctgttcgaggcacaattcctgatatgattgcagattcaggcaaatatataaaactgcaaaacgtttaccgtgaaaaagcaaagaaagatgctgccgctgtgggtaatcatgttgccaaattgctgcagtccattggccaggcaccagagtccatttcagagaaagaattaaaattactctgcagcaattctgcatttcttcgagtggtaagatgtcgatccttagctgaagaatatggtttggatacaattaacaaggatgaaattatttctagcatggacaatccagataatgaaatagtgttgtacttaatgttacgggctgttgatagatttcataaacaacagggtagatatccaggagtatctaactatcaagttgaagaagatataggaaagttgaagtcttgtctcactggcttccttcaggaatatggtttatctgtaatggtgaaagatgattatgtccacgaattttgccgatatggagctgctgagccacataccattgctgcattcttggggggagctgctgctcaagaggtcatcaaaataatcaccaaacaatttgtaatttttaataatacttacatttacagtggcatgtcacaaacttcagcaactttccagttgtagagtaagcaagcaccttaagtagtgtgttaatgattgaaactgtaattgccttcgggttgtgctttagtctgtaaaattctaaaggagagctgctaaattgttttcttaataaacatttttctcatttgtaaaaaaaaaggaattc

SEQ ID NO: 150 - DNA, 4185 bp, Homo sapiens
tgcctctgctgaggtgatctggcgcagagcggaggaggtgcttggcgcttctcaggctcctcctctccccttgcggcctttctaacgttggccctgctcttgtggcctcccgcagaatgtggatgacgcccaaaagaagcaagatggaagtcgacgaggctctagttttccggcccgagtggacccagcgttatttggtggtggagcctccggagggcgatggggccctgtgcctggtctgtcgccgcctcatcgtagctacccgcgaacgcgacgtcaggcgccactacgaggctgagcacgaatactacgagcggtatgtggcggacggcgagcgcgcggccctggtggagcgtctgcgtcagggcgacttgcccgtggcctccttcactcctgaagagagagctgctcgtgcaggcctcgggctctgccgcctcttggccttgaagggtcgcggctggggtgagggggactttgtataccagtgcatggaggtgttgctgagagaggtactgcccgagcatgtaagcgtcctgcaaggcgttgacttatctccagatatcacaaggcagaggatcctgagcattgacaggaatctacgcaaccagctttttaaccgagccagggactttaaagcctattctcttgccttggacgaccaggcttttgtggcctatgagaactacctcctggtctttatccgcggtgtaggccctgagttggaggtgcaagaagatcttctgaccataatcaacctgactcatcatttcagtgttggtgcgctcatgtcggcaatcctagagtccctgcagacagcagggcttagcttgcagagaatggttggactgaccacgacccatactttgaggatgattggtgagaactcaggactcgtctcatacatgagagaaaaggccgtaagccccaactgttggaatgtcattcattattcaggatttcttcacttggaactgttgagctcctatgatgtagatgttaatcagatcataaataccatatccgaatggatagttttgattaagaccagaggcgttaggcgacctgaatttcagactttactaacggaatctgaatcagagcatggtgaaagggttaatggacgatgtctgaacaattggcttaggagagggaaaactttaaaactaatattctctctaagaaaagaaatggaagcgttcttggtttcagtaggggcaacaacagtccacttctcagacaaacaatggctttgtgactttggcttcttggtggacattatggaacaccttcgagaactcagtgaagaattacgagttagtaaagtctttgctgctgctgcctttgaccatatttgtactttcgaagttaagctgaatttatttcaaagacatattgaggaaaaaaatctaacagactttcctgccctcagagaagttgttgatgagctaaaacagcaaaataaggaagatgaaaaaatatttgatcctgataggtatcaaatggtgatctgtcgtctccaaaaagaatttgagagacattttaaggacctcaggttcattaaaaaggacttagaacttttttcaaatccatttaactttaaacctgaatatgcacctatttcagtgagggtggagctaacaaaacttcaggcaaacactaatctttggaatgaatacagaatcaaagacttggggcagttttatgctggattgtctgctgaatcctacccaattatcaaaggggttgcctgtaaggtggcatccttgtttgatagtaaccaaatctgtgaaaaggctttttcatatttgactcgaaaccaacacactttgagtcagccattaacagatgagcatctccaagccctgtttcgggttgccacaactgaaatggagcccggttgggatgaccttgtgagagaaagaaatgaatctaatccataaggctttgtagtacaagattgaaaaactcaacaagaatttaattctaaaagcaaaaattggtttgagttttcaagtttactaatttggattgtgagaaagtaccaagtaccagccgtccaaactgatcacaattaaaattctgacagttgccttttttttcatctcaaatggcagcatgggactgaaacatgagaatgccaccttttttaaaacttagtttagtgacaaagtcattgtcttttatgatatagttaattttaaagagatttagtattaatgtgagttgaatttgcagtctgttttttaggtgttctgaagataaatgccaaaaatttcagctcttattttaatggagtgttaaaattctgattcatgtagtcttaaattatcaactccttaaatgtgcttttgaaccaatttgcagaagctcacatagcaagttcataaggttccaaaaaggaagcccatacataacagtggaggtgttttgtctaaccatcaaaatgtttgagacttttttttaaacatttctgagttcgaaggtaatactgacagatttcttccctcttccctccccatcacccacctcagtgataacacattactgatagaggaagtcattagaatcatttttaagtttcagatataggagacttcatgcaatttggagataagactaattattgggggttttccttggattttttttttaataactgggggctattttatcagcttgcctattaaaggactatggtaagtatagaatcttaatggttgccagttagtaattctttttttttttttttactgtagacacaagtttggccctatcaaaaacgatgaggaaaaaagattgcactccaggattaggaggtgtgagatattttagcttttttgtcttatctgcgtgggtattgctgctttattttaaaaaatcctgcctaaagtaaacactttgttttaaaatgatacagtatcagattttgttagatgctagaaatggatttattctaaaatttggaactgtcgtacacattctatatgtaagatagcacacaagtagaaatatttaaaagcagtcttattcacagattgcagtaattctgtatttctactaagataatctgctttgtgccaaaacagtaatttccaaacttctgttcaccatgaaaaggcaatcttaaagttcattatgtaaaactaattataaacaggacccaatttatattcatagatcctctcaagtattatacaatttaaaaactcttgttccaaagtcctgtcttaactattgaaacaccttaatctgtggttactaatccagcaaattcaaggaaccaggctatgactaagaatttaggtggaattgatgtctgggcaattaaaataaatggcataagagcttaaaaaccaaagttgtgccagtggctttcaactagaggcagtaacctgtcattccagaggatgctgagaaatgtgtaggggcacttttttggttgtcatatttactaggggcttctgttggcatttaagcctaaagacactcacccctgcagtgcatgggacagcctggcacaatgaagaattagccctcccaaaatgtagattattttatttcaagggatagggcagattaccattagaagcaaaattaaaagtacaagctgggcaaactgacagaatactagataggagagactaattccaaccttctaaatttggctagtaaagtgcaataaaggcattgataagttctgttagctcaccatagcacttgtaaatcaggaattaataattgaatcagatttaagggctctgtcctgttatacatatttaaggcagaaaaaaagttacatgtcgattaggtacttatcaagaatggtcaagctgagattttggttaatagagtaagcttacatatctagagaaacaacatagtggaaaaccgaaaaaaaaaaacagaaaaatctaccggtaatttcccagtagctttgaatattcacagcagagctttattacttgagagaaagactggaagacctgaaagccacttctgctttctaaccccagttccttaaatattgaaatcttgtacattttgtgaaattccagtatgttttgcttaaggtgttaataaaattagtttgcatcatgtagtcattgagtgagggggagatataagccaaggattttaaattgacccttagctatagagaatttgctataagctagtcttgtttgt

SEQ ID NO: 151 - DNA, 1658 bp, Homo sapiens; identical to SEQ ID NO: 137

SEQ ID NO: 152 - DNA, 2302 bp, Homo sapiens
ctaaatcaagctggagtcatgagggtagtgggctaagtcgagggtccagcctcttctgccaggaagcccttcttgcttttgagagagggctgtgaccaccccccatccttctccctacactcccagccaacctagtgcccaagcagctaaacttggcttccttctaatcctggaaaaccctgtacccctcctcctcaatctggccctctccacatgcacaccctgagaacacacacagacacacaacacacacacatacacacccctgaacacacacacagacacacatacacccatgatgtgagcaaacacacacacgtgcgccttcatagcccagccaaggcatcgcaggcagggtgtgctgcctgagatggcacctccctttcagccattcttcaagaatgggccacacacagctagaagtcctctcccagctagaagtcctgtcccactctcctggcctgacaagatgagctctcctgggaccttgctctagggcactctgcctctaccctaggacactggaatgccctgggagccccctccctgcaaccagcctgagttcagccccacggacaaagggacacacagcccccaatggagaccattgtaagtggtggggctgggagaggaggaacagaaggaaagccatagcgctctcttgccccttggcatgtaccccaaggcctgatggccactgggctcagcctgtcccccactcctgcctgcttcccggtgagctgcccccgacacgtgcagcccgggctgcctccagggtctggctgagtgggatcaggtggccctccaactcagcacaggaaataagtagaaacatttcagcaggccacctcccctcatcttccccgccctgtccagcgccctggcaaaggctgacaactggctgtcttggggccgaacagccctgcctgctctgagggccacagcctgtgctgcatacccaccgcccagcttctccctgagggcccaccagcctgtgctgcatacccaccacccagcttctccctgagggcccaccagcctgtgctgtacaccccgttagtccctgatcccaaccttctccctcctgccagcacaccgatgcacacaccggaagtggcgagcccaagccctggggacaggtgtagggagaaaagcagccccaggcctcagactcgctctcccatcactggcatagagtgggaggatggctggagggtgtctataggtacagcccgctctggctgctgccaggtgggcccctgccaggggtcctcacccctgtccaccctgtgcctggctgtccctgcacccagatacagcaacatggcctgtacccagcagagtggtggcaaccaccatggttacagcggatgccccgagactctgcttggtaaacgtggcagagcagaatgggaggctgggaccctgaggaagggcccctctcctggcatctgtctcttgctacctaagcctgtgcctctccctaaagagctgcctccctgctgccgagccctggtctggccacgagccactactgcctcccacaggcaccactgcctcccgctgctgcccacaggtggtgccgccaatgggcagtgcctccaggccgaagccttcaatcccccatcttgagccagggcctaaatcctcttaatagtgatggttggttttgtcctcccattaactgcaggtgggatttccacctgggggaatgaggcttgcgttgttcgggcgtctgctggccctgagacatccagtcttccacactcaactgtgggatgggagggtggcgtggctttaccccatggaggctgttccagggctctgggcacacagctgtgctcacacaaaatactgggtggcttggtttagagctaattgtagtggaagcctgcaaggttgaggggtgaaggggagggggcttgcaaggtccaggtaaagatctggaaagacagaacgtacagcttggagggcaagggggactctaaagtgcaaggagatttacagttgggaaaggaggcagtggcagaggggttgagggacaggggcccttaagtccagcgaggaaagctcggtgtggggcccgctctacgctccgtttggggtgacctggaacgcctcttctcccagctccctccagccatcagcagcctcttgtcaagcttctgcctcgccccagtctatccccaaccccaaatcaagaccacctttcttcaacggtcactatttattctttgttcctttttcttttgtgtaagaaacattcacaaaaaccagtgccaaaaccatcaaaaaaaaaaaa

SEQ ID NO: 153 - DNA, 3939 bp, Homo sapiens
ggtcagggtagttccccaaccctccctttcgtgaattccccctcgtcctcgctcaccttaaaaccatcgtgcatcaccatggcgagttgctccttcactcgcgaccaagcgacaagaagactaagaggtgcagcagcggcggcagcggcagctctagcagcagtggtgaccaccccgcttctttcctcgggaaccccgaccgcactcattgggaccgggtcgtcttgtccgggagccatgtggctctccacggccactggctcccggtcagactccgagtccgaagaggaggacctgcccgtcggggaggaagtctgcaaacgcggctacctgcggaaacagaagcatgggcacaggcgctacttcgtgctcaaactcgagactgctgacgccccagctcggctggaatactacgaaaatgccaggaagttccggcacagtgtccgcgccgcggcggctgcagcagcggcggccgcctctggcgccgcgatccccccgctcattccaccgcggcgcgtgatcaccctataccagtgcttttccgtgagccagcgagcagatgcaaggtaccgacacctcattgctcttttcacccaagacgaatacttcgcgatggtggccgagaacgagtcggagcaggaaagctggtacttgctgctcagccgcctcatcctcgagagcaagcgccgccgctgcggcacgctcggcgcgcagccggacggagagccggccgcgctggcggcggcagcggcggcggagccacccttctataaagatgtgtggcaggtaatagtcaaacccagggggctggggcacagaaaagagctgagcggcgtgttccggctgtgtctaaccgacgaggaggtcgtgtttgtgaggctgaacaccgaagtggccagcgtggtcgtccagctcctgagcatccgtcgctgtggacactcggagcagtatttcttcttggaagtaggcaggtccactgtcatcggtccgggagagctctggatgcaggtcgatgactgtgtggttgcccaaaacatgcatgagctgtttttggagaagatgagagccttgtgtgcagacgaatacagagcccgctgccgcagctacagcatcagcatcggcgcccacctgttaaccctgctgtccgctaggaggcacctgggcttggtgccgctcgagccgggaggctggctcagaaggtcccgctttgagcagttttgccacctcagggccatcggcgacggggaagacgagatgcttttcaccaggcgcttcgtaacacccagcgagcctgtggcccactccaggcgaggaagactgcacctgcccagagggcgcaggtcaaggagagcggtttcagtgccggccagcttttttcgccgcttagcacccagcccagcacgtccccggcaccctgcagaagccccgaacaatggagctcgcctgtcttctgaagtgtctggttctggctctggcaactttggggaggaaggcaatccccagggcaaagaagatcaggaaggaagcggaggtgactacatgcctatgaacaattggggctcaggaaatggccggggctcaggaggtggccagggctcaaatggccaaggctccagtagccatagctcgggaggaaaccagtgttcaggcgagggacagggatcccgaggtggtcagggctcaaatggccagggctcaggaggaaaccagtgctctagagatggccagggcaccgcaggtgggcacggttcaggtggtggccagagacctggaggtgggcatggctcaggtggtggccagggacctggagatggccatggctcaggtggtggcaagaactctggggggggcaaaggctcaggaagtgggaaaggatccgatggtgatggtgaacgtggaaaatctctgaagaaaagatcctattttggcaaattaactcaaagcaagcaacagcaaatgccaccacctccaccacctcctcctccacccccaccagctggaggaactggtggaaaagggaagtctgggggaagattcagactttatttttgtgttgacagaggagccacgaaagaatgcaaagaagccaaagaagtgaaagatgcagagatcccagaaggtgcagctcgaggtccccacagagccagagcttttgatgaagatgaggatgacccatacgtgccaatgaggccaggggtggccacccctcttgtaagctccagtgattatatgccaatggctcctcaaaatgtctctgcttcaaaaaagcgccactctcgatccccttttgaagattcaagagggtacatgatgatgtttcccagagtgagcccaccacctgctccgagtcctccaaaagcacctgatactaataaagaggatgactcaaaggacaatgacagtgagagtgactacatgtttatggctcctggagccggtgcaattccaaaaaaccccagaaatcctcagggtggctcttcctccaaaagttggagctcctacttctctctaccaaacccttttcggagctcacctttgggacagaatgacaacagtgagtatgtgccaatgttacctggaaagttcctggggaggggcctagacaaagaagtctcctataactgggaccccaaagatgcagcttcaaagccttcaggtgagggatcattctcaaagcctggagatgggggatcaccttcaaagccttcagatcatgagcccccaaagaataaagctaagagacctaaccgactttcttttattacaaaaggatataaaatcaagccaaaaccacaaaagcccacacatgagcagagagaagctgacagctctagtgactacgtcaacatggacttcactaaaagagagagcaatacaccagctccctctactcaaggactaccagattcgtggggcataattgctgaacccagacagtcagccttttctaattatgtgaatgttgagtttggagtgccatttccaaatccagcaaacgacctctcagatcttttaagagctataccacgtgccaaccccttatctctggacagtgctaggtggccacttcctccccttcccctcagtgctacaggtagcaatgctattgaggaagagggtgactacattgaagtaattttcaactcagcaatgacaccagccatggctcttgctgacagtgccattcgctatgatgctgaaacaggtcgaatctatgtggtcgacccattttctgagtgctgtatggatatttctctctcccccagccgatgttctgaaccaccacctgtagctaggctgctgcaggaagaagagcaggagagaagacgcccacaaagccgttctcaaagtttctttgcagcagccagagccgctgtctctgcttttccaacagacagcctcgagagagacctttccccatcctcagccccggctgtcgcttcggctgcagagccgactttagccctcagccaagttgtagctgcggcctccgcgctcgccgcagccccgggcatcggcgcagcagccgcagctgctggatttgactccgcctctgcccgctggtttcaacctgttgctaatgctgctgatgccgaagcagtaaggggagcccaagacgttgccggtggctcgaaccctggagcccacaacccatctgcaaaccttgccagaggtgataaccaggctggcggggctgccgctgcagctgccgctccggaaccaccacctcgcagtcgccgggtgccaagacccccggagagagaagattctgacaacgacgacgacactcacgtgagaatggattttgccagacgtgataatcagttcgactctcccaaaagaggtcggtaattttagaattaatttccctaaagtgaatggtcattgtctaatgattcgatgcgctacagtctacagtgttagggtatatttcattaa

SEQ ID NO: 154 - DNA, 6728 bp, Homo sapiens
agcagacgggagtttctcctcggggtcggagcaggaggcacgcggagtgtgaggccacgcatgagcggacgctaaccccctccccagccacaaagagtctacatgtctagggtctagacatgttcagctttgtggacctccggctcctgctcctcttagcggccaccgccctcctgacgcacggccaagaggaaggccaagtcgagggccaagacgaagacatcccaccaatcacctgcgtacagaacggcctcaggtaccatgaccgagacgtgtggaaacccgagccctgccggatctgcgtctgcgacaacggcaaggtgttgtgcgatgacgtgatctgtgacgagaccaagaactgccccggcgccgaagtccccgagggcgagtgctgtcccgtctgccccgacggctcagagtcacccaccgaccaagaaaccaccggcgtcgagggacccaagggagacactggcccccgaggcccaaggggacccgcaggcccccctggccgagatggcatccctggacagcctggacttcccggaccccccggaccccccggacctcccggaccccctggcctcggaggaaactttgctccccagctgtcttatggctatgatgagaaatcaaccggaggaatttccgtgcctggccccatgggtccctctggtcctcgtggtctccctggcccccctggtgcacctggtccccaaggcttccaaggtccccctggtgagcctggcgagcctggagcttcaggtcccatgggtccccgaggtcccccaggtccccctggaaagaatggagatgatggggaagctggaaaacctggtcgtcctggtgagcgtgggcctcctgggcctcagggtgctcgaggattgcccggaacagctggcctccctggaatgaagggacacagaggtttcagtggtttggatggtgccaagggagatgctggtcctgctggtcctaagggtgagcctggcagccctggtgaaaatggagctcctggtcagatgggcccccgtggcctgcctggtgagagaggtcgccctggagcccctggccctgctggtgctcgtggaaatgatggtgctactggtgctgccgggccccctggtcccaccggccccgctggtcctcctggcttccctggtgctgttggtgctaagggtgaagctggtccccaagggccccgaggctctgaaggtccccagggtgtgcgtggtgagcctggcccccctggccctgctggtgctgctggccctgctggaaaccctggtgctgatggacagcctggtgctaaaggtgccaatggtgctcctggtattgctggtgctcctggcttccctggtgcccgaggcccctctggaccccagggccccggcggccctcctggtcccaagggtaacagcggtgaacctggtgctcctggcagcaaaggagacactggtgctaagggagagcctggccctgttggtgttcaaggaccccctggccctgctggagaggaaggaaagcgaggagctcgaggtgaacccggacccactggcctgcccggaccccctggcgagcgtggtggacctggtagccgtggtttccctggcgcagatggtgttgctggtcccaagggtcccgctggtgaacgtggttctcctggccccgctggccccaaaggatctcctggtgaagctggtcgtcccggtgaagctggtctgcctggtgccaagggtctgactggaagccctggcagccctggtcctgatggcaaaactggcccccctggtcccgccggtcaagatggtcgccccggacccccaggcccacctggtgcccgtggtcaggctggtgtgatgggattccctggacctaaaggtgctgctggagagcccggcaaggctggagagcgaggtgttcccggaccccctggcgctgtcggtcctgctggcaaagatggagaggctggagctcagggaccccctggccctgctggtcccgctggcgagagaggtgaacaaggccctgctggctcccccggattccagggtctccctggtcctgctggtcctccaggtgaagcaggcaaacctggtgaacagggtgttcctggagaccttggcgcccctggcccctctggagcaagaggcgagagaggtttccctggcgagcgtggtgtgcaaggtccccctggtcctgctggaccccgaggggccaacggtgctcccggcaacgatggtgctaagggtgatgctggtgcccctggagctcccggtagccagggcgcccctggccttcagggaatgcctggtgaacgtggtgcagctggtcttccagggcctaagggtgacagaggtgatgctggtcccaaaggtgctgatggctctcctggcaaagatggcgtccgtggtctgaccggccccattggtcctcctggccctgctggtgcccctggtgacaagggtgaaagtggtcccagcggccctgctggtcccactggagctcgtggtgcccccggagaccgtggtgagcctggtccccccggccctgctggctttgctggcccccctggtgctgacggccaacctggtgctaaaggcgaacctggtgatgctggtgccaaaggcgatgctggtccccctgggcctgccggacccgctggaccccctggccccattggtaatgttggtgctcctggagccaaaggtgctcgcggcagcgctggtccccctggtgctactggtttccctggtgctgctggccgagtcggtcctcctggcccctctggaaatgctggaccccctggccctcctggtcctgctggcaaagaaggcggcaaaggtccccgtggtgagactggccctgctggacgtcctggtgaagttggtccccctggtccccctggccctgctggcgagaaaggatcccctggtgctgatggtcctgctggtgctcctggtactcccgggcctcaaggtattgctggacagcgtggtgtggtcggcctgcctggtcagagaggagagagaggcttccctggtcttcctggcccctctggtgaacctggcaaacaaggtccctctggagcaagtggtgaacgtggtccccccggtcccatgggcccccctggattggctggaccccctggtgaatctggacgtgagggggctcctgctgccgaaggttcccctggacgagacggttctcctggcgccaagggtgaccgtggtgagaccggccccgctggaccccctggtgctcctggtgctcctggtgcccctggccccgttggccctgctggcaagagtggtgatcgtggtgagactggtcctgctggtcccgccggtcccgtcggccccgtcggcgcccgtggccccgccggaccccaaggcccccgtggtgacaagggtgagacaggcgaacagggcgacagaggcataaagggtcaccgtggcttctctggcctccagggtccccctggccctcctggctctcctggtgaacaaggtccctctggagcctctggtcctgctggtccccgaggtccccctggctctgctggtgctcctggcaaagatggactcaacggtctccctggccccattgggccccctggtcctcgcggtcgcactggtgatgctggtcctgttggtccccccggccctcctggacctcctggtccccctggtcctcccagcgctggtttcgacttcagcttcctgccccagccacctcaagagaaggctcacgatggtggccgctactaccgggctgatgatgccaatgtggttcgtgaccgtgacctcgaggtggacaccaccctcaagagcctgagccagcagatcgagaacatccggagcccagagggaagccgcaagaaccccgcccgcacctgccgtgacctcaagatgtgccactctgactggaagagtggagagtactggattgaccccaaccaaggctgcaacctggatgccatcaaagtcttctgcaacatggagactggtgagacctgcgtgtaccccactcagcccagtgtggcccagaagaactggtacatcagcaagaaccccaaggacaagaggcatgtctggttcggcgagagcatgaccgatggattccagttcgagtatggcggccagggctccgaccctgccgatgtggccatccagctgaccttcctgcgcctgatgtccaccgaggcctcccagaacatcacctaccactgcaagaacagcgtggcctacatggaccagcagactggcaacctcaagaaggccctgctcctcaagggctccaacgagatcgagatccgcgccgagggcaacagccgcttcacctacagcgtcactgtcgatggctgcacgagtcacaccggagcctggggcaagacagtgattgaatacaaaaccaccaagtcctcccgcctgcccatcatcgatgtggcccccttggacgttggtgccccagaccaggaattcggcttcgacgttggccctgtctgcttcctgtaaactccctccatcccaacctggctccctcccacccaaccaactttccccccaacccggaaacagacaagcaacccaaactgaacccccccaaaagccaaaaaatgggagacaatttcacatggactttggaaaatatttttttcctttgcattcatctctcaaacttagtttttatctttgaccaaccgaacatgaccaaaaaccaaaagtgcattcaaccttaccaaaaaaaaaaaaaaaaaaaaaagaataaataaataagtttttaaaaaaggaagcttggtccacttgcttgaagacccatgcgggggtaagtccctttctgcccgttgggttatgaaaccccaatgctgccctttctgctcctttctccacaccccccttggcctcccctccactccttcccaaatctgtctccccagaagacacaggaaacaatgtattgtctgcccagcaatcaaaggcaatgctcaaacacccaagtggcccccaccctcagcccgctcctgcccgcccagcacccccaggccctggggacctggggttctcagactgccaaagaagccttgccatctggcgctcccatggctcttgcaacatctccccttcgtttttgagggggtcatgccgggggagccaccagcccctcactgggttcggaggagagtcaggaagggccacgacaaagcagaaacatcggatttggggaacgcgtgtcatcccttgtgccgcaggctgggcgggagagactgttctgttctgttccttgtgtaactgtgttgctgaaagactacctcgttcttgtcttgatgtgtcaccggggcaactgcctgggggcggggatgggggcagggtggaagcggctccccatttttataccaaaggtgctacatctatgtgatgggtggggtggggagggaatcactggtgctatagaaattgagatgcccccccaggccagcaaatgttcctttttgttcaaagtctatttttattccttgatattttttctttctttttttttttttttgtggatggggacttgtgaatttttctaaaggtgctatttaacatgggaggagagcgtgtgcgctccagcccagcccgctgctcactttccaccctctctccacctgcctctggcttctcaggcctctgctctccgacctctctcctctgaaaccctcctccacagctgcagcccatcctcccggctccctcctagtctgtcctgcgtcctctgtccccgggtttcagagacaacttcccaaagcacaaagcagtttttccctaggggtgggaggaagcaaaagactctgtacctattttgtatgtgtataataatttgagatgtttttaattattttgattgctggaataaagcatgtggaaatgacccaaacataatccgcagtggcctcctaatttccttctttggagttgggggaggggtagacatggggaaggggccttggggtgatgggcttgccttccattcctgccctttccctccccactattctcttctagatccctccataaccccactcccctttctctcacccttcttataccgcaaacctttctacttcctctttcattttctattcttgcaatttccttgcaccttttccaaatcctcttctcccctgcaataccatacaggcaatccacgtgcacaacacacacacacactcttcacatctggggttgtccaaacctcatacccactccccttcaagcccatccactctccaccccctggatgccctgcacttggtggcggtgggatgctcatggatactgggagggtgaggggagtggaacccgtgaggaggacctgggggcctctccttgaactgacatgaagggtcatctggcctctgctcccttctcacccacgctgacctcctgccgaaggagcaacgcaacaggagaggggtctgctgagcctggcgagggtctgggagggaccaggaggaaggcgtgctccctgctcgctgtcctggccctgggggagtgagggagacagacacctgggagagctgtggggaaggcactcgcaccgtgctcttgggaaggaaggagacctggccctgctcaccacggactgggtgcctcgacctcctgaatccccagaacacaacccccctgggctggggtggtctggggaaccatcgtgcccccgcctcccgcctactcctttttaagctt

SEQ ID NO: 155 - DNA, 6900 bp, Homo sapiens
gcctgggaggtgcgtcagatccgagctcgccatccagtttcctctccactagtccccccagttggagatctgggaccaacaaggcaccatggcgcagaagggccaactcagtgacgatgagaagttcctctttgtggacaaaaacttcatcaacagcccagtggcccaggctgactgggccgccaagagactcgtctgggtcccctcggagaagcagggcttcgaggcagccagcattaaggaggagaagggggatgaggtggttgtggagctggtggagaatggcaagaaggtcacggttgggaaagatgacatccagaagatgaacccacccaagttctccaaggtggaggacatggcggagctgacgtgcctcaacgaagcctccgtgctacacaacctgagggagcggtacttctcagggctaatatatacgtactctggcctcttctgcgtggtggtcaacccctataaacacctgcccatctactcggagaagatcgtcgacatgtacaagggcaagaagaggcacgagatgccgcctcacatctacgccatcgcagacacggcctaccggagcatgcttcaagatcgggaggaccagtccattctatgcacaggcgagtctggagccgggaaaaccgaaaacaccaagaaggtcattcagtacctggccgtggtggcctcctcccacaagggcaagaaagacacaagtatcacgggagagctggaaaagcagcttctacaagcaaacccgattctggaggctttcggcaacgccaaaacagtgaagaacgacaactcctcacgattcggcaaattcatccgcatcaacttcgacgtcacgggttacatcgtgggagccaacattgagacctatctgctagaaaaatcacgggcaattcgccaagccagagacgagaggacattccacatcttttactacatgattgctggagccaaggagaagatgagaagtgacttgcttttggagggcttcaacaactacaccttcctctccaatggctttgtgcccatcccagcagcccaggatgatgagatgttccaggaaaccgtggaggccatggcaatcatgggtttcagcgaggaggagcagctatccatattgaaggtggtatcatcggtcctgcagcttggaaatatcgtcttcaagaaggaaagaaacacagaccaggcgtccatgccagataacacagctgctcagaaagtttgccacctcatgggaattaatgtgacagatttcaccagatccatcctcactcctcgtatcaaggttgggcgagatgtggtacagaaagctcagacaaaagaacaggctgactttgctgtagaggctttggccaaggcaacatatgagcgccttttccgctggatactcacccgcgtgaacaaagccctggacaagacccatcggcaaggggcttccttcctggggatcctggatatagctggatttgagatctttgaggtgaactccttcgagcagctgtgcatcaactacaccaacgagaagctgcagcagctcttcaaccacaccatgttcatcctggagcaggaggagtaccagcgcgagggcatcgagtggaacttcatcgactttgggctggacctacagccctgcatcgagctcatcgagcgaccgaacaaccctccaggtgtgctggccctgctggacgaggaatgctggttccccaaagccacggacaagtctttcgtggagaagctgtgcacggagcagggcagccaccccaagttccagaagcccaagcagctcaaggacaagactgagttctccatcatccattatgctgggaaggtggactataatgcgagtgcctggctgaccaagaatatggacccgctgaatgacaacgtgacttccctgctcaatgcctcctccgacaagtttgtggccgacctgtggaaggacgtggaccgcatcgtgggcctggaccagatggccaagatgacggagagctcgctgcccagcgcctccaagaccaagaagggcatgttccgcacagtggggcagctgtacaaggagcagctgggcaagctgatgaccacgctacgcaacaccacgcccaacttcgtgcgctgcatcatccccaaccacgagaagaggtccggcaagctggatgcgttcctggtgctggagcagctgcggtgcaatggggtgctggaaggcattcgcatctgccggcagggcttccccaaccggatcgtcttccaggagttccgccaacgctacgagatcctggcggcgaatgccatccccaaaggcttcatggacgggaagcaggcctgcattctcatgatcaaagccctggaacttgaccccaacttatacaggatagggcagagcaaaatcttcttccgaactggcgtcctggcccacctagaggaggagcgagatttgaagatcaccgatgtcatcatggccttccaggcgatgtgtcgtggctacttggccagaaaggcttttgccaagaggcagcagcagctgaccgccatgaaggtgattcagaggaactgcgccgcctacctcaagctgcggaactggcagtggtggaggcttttcaccaaagtgaagccactgctgcaggtgacacggcaggaggaggagatgcaggccaaggaggatgaactgcagaagaccaaggagcggcagcagaaggcagagaatgagcttaaggagctggaacagaagcactcgcagctgaccgaggagaagaacctgctacaggaacagctgcaggcagagacagagctgtatgcagaggctgaggagatgcgggtgcggctggcggccaagaagcaggagctggaggagatactgcatgagatggaggcccgcctggaggaggaggaagacaggggccagcagctacaggctgaaaggaagaagatggcccagcagatgctggaccttgaagaacagctggaggaggaggaagctgccaggcagaagctgcaacttgagaaggtcacggctgaggccaagatcaagaaactggaggatgagatcctggtcatggatgatcagaacaataaactatcaaaagaacgaaaactccttgaggagaggattagtgacttaacgacaaatcttgcagaagaggaagaaaaggccaagaatcttaccaagctgaaaaacaagcatgaatctatgatttcagaactggaagtgcggctaaagaaggaagagaagagccgacaggagctggagaagctgaaacggaagctggagggtgatgccagcgacttccacgagcagatcgctgacctccaggcgcagatcgcagagctcaagatgcagctggccaagaaggaggaggagctgcaggcggccctggccaggcttgacgatgaaatcgctcagaagaacaatgccctgaagaagatccgggagctggagggccacatctcagacctccaggaggacctggactcagagcgggccgccaggaacaaggctgaaaagcagaagcgagacctcggcgaggagctggaggccctaaagacagagctggaagacacactggacagcacagccactcagcaggagctcagggccaagagggagcaggaggtgacggtgctgaagaaggccctggatgaagagacgcggtcccatgaggctcaggtccaggagatgaggcagaaacacgcacaggcggtggaggagctcacagagcagcttgagcagttcaagagggccaaggcgaacctagacaagaataagcagacgctggagaaagagaacgcagacctggccggggagctgcgggtcctgggccaggccaagcaggaggtggaacataagaagaagaagctggaggcgcaggtgcaggagctgcagtccaagtgcagcgatggggagcgggcccgggcggagctcaatgacaaagtccacaagctgcagaatgaagttgagagcgtcacagggatgcttaacgaggccgaggggaaggccattaagctggccaaggacgtggcgtccctcagttcccagctccaggacacccaggagctgcttcaagaagaaacccggcagaagctcaacgtgtctacgaagctgcgccagctggaggaggagcggaacagcctgcaagaccagctggacgaggagatggaggccaagcagaacctggagcgccacatctccactctcaacatccagctctccgactcgaagaagaagctgcaggactttgccagcaccgtggaagctctggaagaggggaagaagaggttccagaaggagatcgagaacctcacccagcagtacgaggagaaggcggccgcttatgataaactggaaaagaccaagaacaggcttcagcaggagctggacgacctggttgttgatttggacaaccagcggcaactcgtgtccaacctggaaaagaagcagaggaaatttgatcagttgttagccgaggagaaaaacatctcttccaaatacgcggatgagagggacagagctgaggcagaagccagggagaaggaaaccaaggccctgtccctggctcgggcccttgaagaggccttggaagccaaagaggaactcgagcggaccaacaaaatgctcaaagccgaaatggaagacctggtcagctccaaggatgacgtgggcaagaacgtccatgagctggagaagtccaagcgggccctggagacccagatggaggagatgaagacgcagctggaagagctggaggacgagctgcaagccacggaggacgccaaactgcggctggaagtcaacatgcaggcgctcaagggccagttcgaaagggatctccaagcccgggacgagcagaatgaggagaagaggaggcaactgcagagacagcttcacgagtatgagacggaactggaagacgagcgaaagcaacgtgccctggcagctgcagcaaagaagaagctggaaggggacctgaaagacctggagcttcaggccgactctgccatcaaggggagggaggaagccatcaagcagctacgcaaactgcaggctcagatgaaggactttcaaagagagctggaagatgcccgtgcctccagagatgagatctttgccacagccaaagagaatgagaagaaagccaagagcttggaagcagacctcatgcagctacaagaggacctcgccgccgctgagagggctcgcaaacaagcggacctcgagaaggaggaactggcagaggagctggccagtagcctgtcgggaaggaacgcactccaggacgagaagcgccgcctggaggcccggatcgcccagctggaggaggagctggaggaggagcagggcaacatggaggccatgagcgaccgggtccgcaaagccacacagcaggccgagcagctcagcaacgagctggccacagagcgcagcacggcccagaagaatgagagtgcccggcagcagctcgagcggcagaacaaggagctccggagcaagctccacgagatggagggggccgtcaagtccaagttcaagtccaccatcgcggcgctggaggccaagattgcacagctggaggagcaggtcgagcaggaggccagagagaaacaggcggccaccaagtcgctgaagcagaaagacaagaagctgaaggaaatcttgctgcaggtggaggacgagcgcaagatggccgagcagtacaaggagcaggcagagaaaggcaatgccagggtcaagcagctcaagaggcagctggaggaggcagaggaggagtcccagcgcatcaacgccaaccgcaggaagctgcagcgggagctggatgaggccacggagagcaacgaggccatgggccgcgaggtgaacgcactcaagagcaagctcagagggccccccccacaggaaacttcgcagtgatgcaccaggcgaggaaacgagacctctttcgttccttctagaaggtctggaggacgtagagttattgaaaatgcagatggttctgaggaggaaacggacactcgagacgcagacttcaatggaaccaaggccagtgaataagcaactttctacagttttgcaccacggcaagaaaaccaaaaaccaaaacaaacaaacaaaaaaaacccaacaacaacccagaacaaagcaaaacccagcagactgtacttagcattgtctaaatccattctcaaattccaaatatcacagacacccctcacacaaggaatataaaaaccaccaccctccagcctgggcaacgtagtaaaacctcatctatacaagaatttaaaaataagctgggcgtggtggtacacacctgtggtcccagctactagggaggctgagccaggaagaacgctccagcccaggacttcgaggctgcaatgagctataattgcatcattgcactccagcctgggcaacagagaccctgtctcaaccaccaccaccaccaccacccctactacccctgtattcaaggtaaaaattgaagtttgtatgatgtaagagatgagaaaaacccaacaggaaacacagacacatcctccagttctatcaatggattgtgcagacactgagtttttagaaaaacatatccacggtaaccggtccctggcaattctgtttacatgaaatggggagaaagtcaccgaaatgggtgccgccggcccccactcccaattcattccctaacctgcaaacctttccaacttctcacgtcaggcctttgagaattctttccccctctcctggtttccacacctcagacacgcacagttcaccaagtgccttctgtagtcacatgaattgaaaaggagacgctgctcccacggaggggagcaggaatgctgcactgtttacaccctgactgtgcttaaaaacactttcactaataaatggttataaatcac

SEQ ID NO: 156 - DNA, 755 bp, Homo sapiens
caccatgagccctctgctccgccgcctgctgctcgccgcactcctgcagctggcccccgcccaggcccctgtctcccagcctgatgcccctggccaccagaggaaagtggtgtcatggatagatgtgtatactcgcgctacctgccagccccgggaggtggtggtgcccttgactgtggagctcatgggcaccgtggccaaacagctggtgcccagctgcgtgactgtgcagcgctgtggtggctgctgccctgacgatggcctggagtgtgtgcccactgggcagcaccaagtccggatgcagatcctcatgatccggtacccgagcagtcagctgggggagatgtccctggaagaacacagccagtgtgaatgcagacctaaaaaaaaggacagtgctgtgaagccagacagggctgccactccccaccaccgtccccagccccgttctgttccgggctgggactctgcccccggagcaccctccccagctgacatcacccatcccactccagccccaggcccctctgcccacgctgcacccagcaccaccagcgccctgacccccggacctgccgccgccgctgccgacgccgcagcttcctccgttgccaagggcggggcttagagctcaacccagacacctgcaggtgccggaagctgcgaaggtgacacatggcttttcagactcagcagggtgacttgcctcagaggctatatcccagtgggggaacaaagaggagcctggtaaaaaa

SEQ ID NO: 157 - DNA, 1851 bp, Homo sapiens
cacaggccgacgtcgagagggcctgctttactcctcctctttctcctccttctcccgcggcttctgcgcgagaggcgtcgccgggatctgggttttggaagaaggatctttgtgggaagacagggtgaatttatcacagaggaataacgagggagaggagaaaggtttcctaaagacaaaaaaaatggaggaatctgtaaaccaaatgcagccactgaatgagaagcagatagccaattctcaggatggatatgtatggcaagtcactgacatgaatcgactacaccggttcttatgtttcggttctgaaggtgggacttattatatcaaagaacagaagttgggccttgaaaatgctgaagctttaattagattgattgaagatggcagaggatgtgaagtgatacaagaaataaagtcatttagtcaagaaggcagaaccacaaagcaagagcctatgctctttgcacttgccatttgttcccagtgctccgacataagcacaaaacaagcagcatttaaagctgtttctgaagtttgtcgcattcctacccatctctttacttttatccagtttaagaaagatctgaaggaaagcatgaaatgtggcatgtggggtcgtgccctccggaaggctatagcggactggtacaatgagaaaggtggcatggcccttgctctggcagttacaaaatataaacagagaaatggctggtctcacaaagatctattaagattgtcacatcttaaaccttccagtgaaggacttgcaattgtgaccaaatatattacaaagggctggaaagaagttcatgaattgtataaagaaaaagcactctctgtggagactgaaaaattattaaagtatctggaggctgtagagaaagtgaagcgcacaagagatgagctagaagtcattcatctaatagaagaacatagattagttagagaacatcttttaacaaatcacttaaagtctaaagaggtatggaaggctttgttacaagaaatgccgcttactgcattactaaggaatctaggaaagatgactgctaattcagtacttgaaccaggaaattcagaagtatctttagtatgtgaaaaactgtgtaatgaaaaactattaaaaaaggctcgtatacatccatttcatattttgatcgcattagaaacttacaagacaggtcatggtctcagagggaaactgaagtggcgccctgatgaagaaattttgaaagcattggatgctgctttttataaaacatttaagacagttgaaccaactggaaaacgtttcttactagctgttgatgtcagtgcttctatgaaccaaagagttttgggtagtatactcaacgctagtacagttgctgcagcaatgtgcatggttgtcacacgaacagaaaaagattcttatgtagttgctttttccgatgaaatggtaccatgtccagtgactacagatatgaccttacaacaggttttaatggctatgagtcagatcccagcaggtggaactgattgctctcttccaatgatctgggctcagaagacaaacacacctgctgatgtcttcattgtattcactgataatgagacctttgctggaggtgtccatcctgctattgctctgagggagtatcgaaagaaaatggatattccagctaaattgattgtttgtggaatgacatcaaatggtttcaccattgcagacccagatgatagagccttgcaaaataccctactaaataaatcattttagacatggagtgcaggtggacactgtgtgaactgtttttggtcagttattgtagaaattgatagatgtaccaaataaactctatgcacatt

SEQ ID NO: 158 - DNA, 3358 bp, Homo sapiens
gagctggagcagccgccaccgccgccgccgagggagccccgggacggcagcccctgggcgcagggtgcgctgttctcggagtccgacccagggcgactcacgcccactggtgcgacccggacagcctgggactgacccgccggcccaggcgaggctgcagccagagggctgggaagggatcgcgctcgcggcatccagaggcggccaggcggaggcgagggagcaggttagagggacaaagagctttgcagacgtccccggcgtcctgcgagcgccagcggccgggacgaggcggccgggagcccgggaagagcccgtggatgttctgcgcgcggcctgggagccgccgccgccgccgcctcagcgagaggaggaatgcaccggccgcgccgccgcgggacgcgcccgccgctcctggcgctgctggccgcgctgctgctggccgcacgcggggctgctgcccaagaaacagagctgtcagtcagtgctgaattagtgcctacctcatcatggaacatctcaagtgaactcaacaaagattcttacctgacccttgatgaaccaatgaataacatcaccacgtctctgggccagacagcagaactgcactgcaaagtctctgggaatccacctcccaccatccgctggttcaaaaatgatgctcctgtggtccaggagccccggaggctctcctttcggtccaccatctatggctctcggctgcggattagaaacctcgacaccacagacacaggctacttccagtgcgtggcaacaaacggcaaggaggtggtttcttccactggagtcttgtttgtcaagtttggcccccctcccactgcaagtccaggatactcagatgagtatgaagaagatggattctgtcagccatacagagggattgcatgtgcaagatttattggcaaccgcaccgtctatatggagtctttgcacatgcaaggggaaatagaaaatcagatcacagctgccttcactatgattggcacttccagtcacttatctgataagtgttctcagttcgccattccttccctgtgccactatgccttcccgtactgcgatgaaacttcatccgtcccaaagccccgtgacttgtgtcgcgatgaatgtgaaatcctggagaatgtcctgtgtcaaacagagtacatttttgcaagatcaaatcccatgattctgatgaggctgaaactgccaaactgtgaagatctcccccagccagagagcccagaagctgcgaactgtatccggattggaattcccatggcagatcctataaataaaaatcacaagtgttataacagcacaggtgtggactaccgggggaccgtcagtgtgaccaaatcagggcgccagtgccagccatggaattcccagtatccccacacacacactttcaccgcccttcgtttcccagagctgaatggaggccattcctactgccgcaacccagggaatcaaaaggaagctccctggtgcttcaccttggatgaaaactttaagtctgatctgtgtgacatcccagcttgcgattcaaaggattccaaggagaagaataaaatggaaatcctgtacatactagtgccaagtgtggccattcccctggccattgctttactcttcttcttcatttgcgtctgtcggaataaccagaagtcatcgtcggcaccagtccagaggcaaccaaaacacgtcagaggtcaaaatgtggagatgtcaatgctgaatgcatataaacccaagagcaaggctaaagagctacctctttctgctgtacgctttatggaagaattgggtgagtgtgcctttggaaaaatctataaaggccatctctatctcccaggcatggaccatgctcagctggttgctatcaagaccttgaaagactataacaacccccagcaatggatggaatttcaacaagaagcctccctaatggcagaactgcaccaccccaatattgtctgccttctaggtgccgtcactcaggaacaacctgtgtgcatgctttttgagtatattaatcagggggatctccatgagttcctcatcatgagatccccacactctgatgttggctgcagcagtgatgaagatgggactgtgaaatccagcctggaccacggagattttctgcacattgcaattcagattgcagctggcatggaatacctgtctagtcacttctttgtccacaaggaccttgcagctcgcaatattttaatcggagagcaacttcatgtaaagatttcagacttggggctttccagagaaatttactccgctgattactacagggtccagagtaagtccttgctgcccattcgctggatgccccctgaagccatcatgtatggcaaattctcttctgattcagatatctggtcctttggggttgtcttgtgggagattttcagttttggactccagccatattatggattcagtaaccaggaagtgattgagatggtgagaaaacggcagctcttaccatgctctgaagactgcccacccagaatgtacagcctcatgacagagtgctggaatgagattccttctaggagaccaagatttaaagatattcacgtccggcttcggtcctgggagggactctcaagtcacacaagctctactactccttcagggggaaatgccaccacacagacaacctccctcagtgccagcccagtgagtaatctcagtaaccccagatatcctaattacatgttcccgagccagggtattacaccacagggccagattgctggtttcattggcccgccaatacctcagaaccagcgattcattcccatcaatggatacccaatacctcctggatatgcagcgtttccagctgcccactaccagccaacaggtcctcccagagtgattcagcactgcccacctcccaagagtcggtccccaagcagtgccagtgggtcgactagcactggccatgtgactagcttgccctcatcaggatccaatcaggaagcaaatattcctttactaccacacatgtcaattccaaatcatcctggtggaatgggtatcaccgtttttggcaacaaatctcaaaaaccctacaaaattgactcaaagcaagcatctttactaggagacgccaatattcatggacacaccgaatctatgatttctgcagaactgtaaaatgcacaacttttgtaaatgtggtatacaggacaaactagacggccgtagaaaagatttatattcaaatgtttttattaaagtaaggttctcatttagcagacatcgcaacaagtaccttctgtgaagtttcactgtgtcttaccaagcaggacagacactcggccag

SEQ ID NO: 159 - DNA, 1020 bp, Homo sapiens
ggccttccaaagtgctgggattacaggcgtgagtcaccgcgcccggccaaataaaataaaatgttaaagcaaattcaggactacccctcctccaagtcttctgttccctttgggcgcccaggtgagcgggggaggggctgggggagtaataacatcaaaagagcgccttttcctcccttattccgaggagacttccctgggcctgactcccggtcctgtccccagcgccccgcggcctctggagccccttcagtgaccaagatacagagatcaggacgcctttgcgccgccccaggtgcccgcccctagctggctctgcttgggccgcgagggaaggtgaggtcgggggcggagccggggcgtgacagccggggtgtgtgtccgccgggcttggtgcctccggtggccctgcagcaccgtcccacctctgccaccctccgatggggccgctacctgtgtgcctgccaatcatgctgctcctgctactgccgtcgctgctgctgctgctgcttctacctggccccgggtccggcgaggcctccaggatattacgtgtgcaccggcgtgggatcctggaactggcaggaactgtgggttgtgttggtccccgaacccccatcgcctatatgaaatatggttgcttttgtggcttgggaggccatggccagccccgcgatgccattgactggtgctgccatggccacgactgttgttacactcgagctgaggaggccggctgcagccccaagacagagcgctactcctggcagtgcgtcaatcagagcgtcctgtgcggaccggcagagaacaaatgccaagaactgttgtgcaagtgtgaccaggagattgctaactgcttagcccaaactgagtacaacttaaagtacctcttctacccccagttcctatgtgagccggactcgcccaagtgtgactgactaccttgacttgaaatgctcttttgcacaaggaaataaagcgtcctctcagtaatgaaaaaaaaaaaaaaaaaaaaaaaaa

SEQ ID NO: 160 - DNA, 4998 bp, Homo sapiens
  misc_feature (4581)..(4581): n is a, c, g, or t
  misc_feature (4874)..(4874): n is a, c, g, or t
  misc_feature (4913)..(4914): n is a, c, g, or t
atgaggacacttgggacttgcctggcgactttggccggacttttgctaactgcggcgggcgagacgttctcaggtggctgcctctttgatgagccgtatagcacatgtggatatagtcaatctgaaggtgatgacttcaattgggagcaagtgaacaccttgactaaaccgacttctgatccatggatgccatcaggttctctcatgctggtgaatgcctctgggagacctgaggggcagagagcccacctgctcttaccccaacttaaggaaaatgacacccactgcatcgattttcactattttgtgtccagcaagagtaattctcctccggggttactcaatgtctacgtgaaggtcaataacgggccactggggaatcctatctggaatatatctggagacccaacacgtacatggaacagggcagaactggccattagtactttctggcctaacttttatcaggtgatttttgaagtgataacttctggacatcaaggctatctcgctatcgatgaggtgaaggtgttaggacatccatgtaccaggactcctcacttcctgcggattcagaatgtggaagttaatgctggccagtttgctaccttccagtgcagtgccatcggcaggaccgtggcaggagacaggctctggttacagggcattgatgtgcgagatgctcctctgaaggaaatcaaggtgaccagctcccgacgcttcattgcttcatttaatgttgtgaataccaccaaacgagatgctggaaagtaccgctgcatgattcgcactgaaggaggtgttggaatatcaaactatgcagagttggtagttaaagaaccacccgttcctattgccccacctcagctcgcctctgtaggagccacctacctgtggatacagctcaacgccaactccatcaatggggatgggcccattgtggcccgagaggtggagtactgcacggccagtgggagctggaatgaccggcagccagtcgattccacgagctataaaattggacaccttgacccagatacagaatatgagattagtgtgctcctgaccaggccaggggagggtggcactggctctcctggtccagctctcaggacaagaacaaagtgtgctgatcccatgcgaggcccaagaaaactagaagtagtggaggtcaaatctcggcaaatcactatccgctgggagccatttggatataatgtaactcgttgccacagttataatctcactgtccactactgttaccaagttggaggacaagaacaagtgcgagaagaagtaagctgggatacagaaaattcacaccctcaacacacgatcactaacctgtcaccatacaccaatgtcagtgtgaaactgatcctcatgaacccagagggccggaaggaaagccaagaactcatagtgcagacagatgaagacctcccaggtgctgttcccactgaatccatacaaggaagtacctttgaagagaagatatttcttcagtggagagaaccaactcaaacatatggtgtaatcactttatatgagatcacctacaaagcagtcagttcctttgacccagaaatagatttatccaatcagagtggaagagtttcaaagctgggaaatgaaacccattttctgttttttggactgtatccggggaccacatactcctttaccatccgagctagcacagctaagggttttgggcctccagcaacaaaccagttcaccaccaaaatatcagcaccctctatgccagcttatgaacttgagacacctttgaatcaaactgacaataccgtgacagtcatgctgaaacctgcccacagcagaggagcacctgtcagtgtctatcaaatagttgttgaggaagaacgtcctcgaagaactaaaaagacgacagaaatcttaaagtgctacccagtgccaattcacttccagaatgcttctctgctgaactcacagtactactttgctgcagaatttcctgcagacagcctccaagctgcgcagccttttacaattggtgataataagacatataatggatactggaacactccccttctcccctataaaagctacagaatttatttccaagctgctagtagagccaatggggaaaccaaaatagactgtgtccaagtggccacaaaaggagctgccactccgaaaccagtcccagaacccgagaaacagacagaccatacagttaaaattgctggagtcatcgcgggcatcttgctgttcgtgattatatttcttggagttgtgttggtaatgaagaaaaggaaactggccaagaagcggaaagagaccatgagcagcacccgacaggagatgactgtgatggtgaactcaatggacaagagctatgctgagcagggcacaaactgcgacgaggctttctcattcatggacacgcacaatctgaatgggagatctgtgtcttcaccatcgtccttcacaatgaaaacaaatacactgagcacatcggtgcctaattcctattacccagatgaaacccacacaatggccagcgataccagcagcctggtgcagtcccatacttacaagaagcgagagccggccgacgtgccctatcagactgggcagctccaccccgccatccgggtggcagacctccttcagcacatcacacagatgaagtgtgcggagggctacggcttcaaggaggaatacgagagcttctttgaagggcagtctgcaccatgggactcggctaagaaagatgagaacagaatgaagaacagatacgggaatatcattgcatacgatcattcccgagtgaggctgcagacaatagaaggagacacaaactcagactatatcaatggcaattatatcgatggttatcatcgacccaatcattacattgctacccaagggccaatgcaggaaaccatctatgacttctggaggatggtgtggcacgaaaacactgcaagtatcatcatggtgaccaatcttgtggaagtgggaagggtcaaatgctgcaaatactggccagatgacacagagatatataaagacattaaagttaccctaatagaaacagaactactggcagaatatgtgataagaacatttgctgttgaaaagagaggtgtgcatgaaatccgagagatcagacagtttcacttcactggctggccggatcatggggtcccctaccatgccaccggcctgctgggattcgtgcggcaagtcaagtccaagagcccgcccagtgcaggcccactggtggtgcactgcagtgctggtgcagggaggactggctgtttcatcgtcattgatatcatgttggacatggccgaaagggaaggggtcgtagacatctacaactgcgtcagggagctgcggtcacggagggtgaacatggtgcaaacagaggagcagtatgtgtttatccacgatgcgatcctggaagcctgtctttgtggggacacctctgtgcctgcttcccaagttaggtctctgtattatgacatgaacaaactggatccacagacaaactcaagccagattaaagaggaattccggacgctaaacatggtgacaccaacgctgcgagtagaggactgcagcatcgcactgttgccccggaaccatgagaaaaaccggtgcatggacatcctgcccccagaccgctgcctgcccttcctcatcaccatcgatggggagagcagcaactacatcaatgctgccctcatggacagctataaacagccttcagcttttatagtcacccagcatcctttgccaaacacagtgaaagacttttggagactggtcctggattatcactgcacatccgtagttatgctaaatgatgtggatcctgcccagttgtgtccacagtactggccagaaaacggagtacacagacacggccccatccaggtggaatttgtctctgctgacctggaagaggacatcatcagcaggatattccgcatttacaatgccgccagaccccaagatggatatcggatggtgcagcaattccagttcctgggctggccgatgtacagggacacaccagtgtctaagcgctccttcttgaagctcattcgccaggtggacaagtggcaagaggaatacaatggcggggaaggcccgaccgttgtgcactgcttgaacgggggaggccgcagtgggacgttctgcgccatcagcatcgtatgtgagatgctccggcaccagagaaccgtggatgtctttcacgctgtgaagacactgaggaacaacaagcccaacatggtcgacctcctggatcagtacaagttctgctacgaggtggccctggaatacttgaattctggctgatggtgtaaacagctctgcaaacaatccctttcataccacaaagccaagacgttccatggtatttgtgcaaaagagatgaagacttctcaatatgcttattttgctttgactaattggctctttttaagagccaagaaagtgtttctaaaattgcttgcactgcccaatcccagtaatgctgctgcctgacagaaacacacacacagccacagttgccaaatncccgtactccttgccacggttctagagcagcgtagacagctggtaaactgaagagcacaactatattcttatgaaggaatttgtacctttggggtattattttgtggcccgtgaccctcgttattgttacagctgagtgtatgtttttgttctgtggagaatgctatctggcattatggtaatatattattttaggtaatatttgtactttaacatgttgcataatatatgcttatgtagctttccaggactaacagataaatgtgtaataacaaagatatgttgtatgagtngtcgtttctgtcagatttgtattgtttccaagggaaaannttgggggaggactcagttcacaaaatgcaaaactcaacgatcagattcacggacccagagcttttccatgtgtttatattgtaa

SEQ ID NO: 161 - DNA, 4299 bp, Homo sapiens
ggacgccgggttccggtcctggcccccccgccatccccccaacagaacagggtcatgaaaagaggccgcccggcggggcccgcaggcgatgcgcggcgccggtggcccccgcggccctcggggccccgctaagatgctgctgctgctggcgctggcctgcgccagcccgttcccggaggaggcgccggggccgggcggggccggtgggcccggcggcggcctcggcggggcgcggccgctcaacgtggcgctcgtgttctcggggcccgcgtacgcggccgaggcggcacgcctgggcccggccgtggcggcggcggtgcgcagcccgggcctagacgtgcggcccgtggcgctggtgctcaacggctcggacccgcgcagcctcgtgctgcagctctgcgacctgctgtcggggttgcgcgtgcacggcgtggtcttcgaagacgactcgcgcgcgcccgccgtcgcgcccatcctcgacttcctgtcggcgcagacctcgctgcccatcgtggccgtgcacggcggcgccgcgctcgtgctcacgcccaaggagaagggctccaccttcctgcagctgggctcttccaccgagcaacagcttcaggtcatctttgaggtgctggaggagtatgactggacgtcctttgtagccgtgaccactcgtgcccctggccaccgggccttcctgtcctacattgaggtgctgactgacggtagtctggtgggctgggagcaccgcggagcgctgacgctggaccctggggcgggcgaggccgtgctcagtgcccagctccgcagtgtcagcgcgcagatccgcctgctcttctgcgcccgagaggaggccgagcccgtgttccgcgcagctgaggaggctggcctcactggatctggctacgtctggttcatggtggggccccagctggctggaggcgggggctctggggcccctggtgagccccctcttctgccaggaggcgcccccctgcctgccgggctgtttgcagtgcgctcggctggctggcgggatgacctggctcggcgagtggcagctggcgtggccgtagtggccagaggtgcccaggccctgctgcgtgattatggtttccttcctgagctcggccacgactgtcgcgcccagaaccgcacccaccgcggcgagagtctgcataggtacttcatgaacatcacgtgggataaccgggattactccttcaatgaggacggcttcctagtgaacccctccctggtggtcatctccctcaccagagacaggacgtgggaggtggtgggcagctgggagcagcagacgctccgcctcaagtacccgctgtggtcccgctatggtcgcttcctgcagccagtggacgacacgcagcacctcacggtggccacgctggaggaaaggccgtttgtcatcgtggagcctgcagaccctatcagcggcacctgcatccgagactccgtcccctgccggagccagctcaaccgaacccacagccctccaccggatgccccccgcccggaaaagcgctgctgcaagggtttctgcatcgacattctgaagcggctggcgcataccatcggcttcagctacgacctctacctggtcaccaatggcaagcacggaaagaagatcgatggcgtctggaacggcatgatcggggaggtgttctaccagcgcgcagacatggccatcggctccctcaccatcaacgaggagcgctccgagatcgtggacttctccgtccccttcgtggagaccggcatcagcgtcatggtggcgcgcagcaatggcacggtgtccccctcggccttcctcgagccctacagccccgccgtgtgggtgatgatgttcgtcatgtgcctcactgtggtcgccgtcactgttttcatcttcgagtacctcagtcctgttggttacaaccgcagcctggccacgggcaagcgccctggcggttcaaccttcaccattgggaaatccatctggctgctctgggccctggtgttcaataattcggtgcccgtggagaacccccggggaaccaccagcaaaatcatggtgctggtgtgggccttcttcgccgtcatcttcctcgccagctacacagccaacctggccgccttcatgatccaggaggagtacgtggatactgtgtctgggctcagtgaccgcaagttccagaggccccaggagcagtacccgcccctgaagtttgggaccgtgcccaacggctccacggagaagaacatccgcagcaactatcccgacatgcacagctacatggtgcgctacaaccagccccgcgtagaggaagcgctcactcagctcaaggcagggaagctggacgccttcatctacgatgctgcagtgctcaattacatggcccgcaaggacgagggctgcaagcttgtcaccatcggctccggcaaggtcttcgccacgacaggctatggcatcgccctgcacaagggctcccgctggaagcggcccatcgacctggcgttgctgcagttcctgggggatgatgagatcgagatgctggagcggctgtggctctctgggatctgccacaatgacaaaatcgaggtgatgagcagcaagctggacatcgacaacatggcgggcgtcttctacatgctcctggtggccatgggcctgtccctgctggtcttcgcctgggagcacctggtgtactggcgcctgcggcactgcctggggcccacccaccgcatggacttcctgctggccttctccaggggcatgtacagctgctgcagcgctgaggccgccccaccgcccgccaagcccccgccgccgccacagcccctgcccagccccgcgtaccccgcgccggggccggctcccgggcccgcacctttcgtgccccgcgagcgcgcctcagtggaccgctggcgccggaccaagggcgcggggccgccggggggcgcgggcctggccgacggcttccaccgctactacggccccatcgagccgcagggcctaggcctcggcctgggcgaagcgcgcgcggcaccgcggggcgcagccgggcgcccgctgtccccgccggccgctcagcccccgcagaagccgccggcctcctatttcgccatcgtacgcgacaaggagccagccgagccccccgccggcgccttccccggcttcccgtcgccgcccgcgccccccgccgccgcggccaccgccgtcgggccgccactctgccgcttggccttcgaggacgagagcccgccggcgcccgcgcggtggccgcgctcggaccccgagagccaacccctgctggggccaggcgcgggcggcgcggggggcacggggggcgcaggcggaggagccccggccgctccgcccccgtgctgcgccgcgccgcccccgtgcccttacctcgatctcgagccgtcgccgtcggactcggaggactcggagagcctgggcggcgcgtcgctgggcggcctggatccctggtggttcgccgacttcccttacccgtatgccgagcgcctcgggccgccgcccggccgctactggtcggtcgacaagctcgggggctggcgcgccgggagctgggactacctgcccccgcgcagcggtccggccgcctggcactgtcggcactgcgccagcctggagctgctgccgccgccgcgccatctcagctgctcgcacgatggcctggacggcggctggtgggcgccaccgcctccaccctgggccgccgggcccctgccccgacgccgggcccgctgcgggtgcccgcggtcgcacccgcaccgcccgcgggcctcgcaccgcacgcccgccgctgccgcgccccaccaccacaggcaccggcgcgccgctgggggctgggacctcccgccgcccgcgcccacctcgcgctcgctcgaggacctcagctcgtgccctcgcgccgcccctgcgcgcaggcttaccgggccctcccgccacgctcgcaggtgtccgcacgccgcgcactgggggccgccgctgcccacagcttcccaccggagacaccggggcggggacctgggcacccgcaggggctcggcgcacttctctagcctcgagtccgaggtatgacgcggccccgggggccccaccgcccccttggtcagcgcaggccacggcccgagggggcgcccgcagtggacaggacccgcgtgggttgggaaggaaagcagtggaactggccggaccccgcctggagcagcgtcctgcgccccctggttctggaggaaccgcaagccggagaggatttggtccctcaactatcacccagg

SEQ ID NO: 162 - DNA, 312 bp, Homo sapiens
atgtctggccgcggcaaaggcgggaagggtcttggcaaaggcggcgctaagcgccaccgtaaagtactgcgcgacaatatccagggcatcaccaagccggccatccggcgccttgctcgccgcggcggcgtgaagcgcatctccggcctcatctacgaggagactcgcggggtgctgaaggtgttcctggagaacgtgatccgggacgccgtgacctatacagagcacgccaagcgcaagacggtcaccgccatggatgtggtctacgcgctcaagcgccagggccgcaccctctacggtttcggtggttga

SEQ ID NO: 163 - DNA, 430 bp, Homo sapiens
  misc_feature (14)..(14): n is a, c, g, or t
  misc_feature (390)..(396): n is a, c, g, or t
gacaaagcgtgggngagactcctcttgctcgtcatgtctggccgcggcaaaggcgggaagggtcttggcaaaggcggcgctaagcgccaccgtaaagtactgcgcgacaatatccagggcatcaccaagccggccatccggcgccttgctcgccgcggcggcgtgaagcgcatctccggcctcatctacgaggagactcgcggggtgctgaaggtgttcctggagaacgtgatccgggacgccgtgacctatacagagcacgccaagcgcaagacggtcaccgccatggatgtggtctacgcgctcaagcgccagggccgcaccctctacggtttcggtggttgagcgtccttttctaccaataaaaggcccttttcagggccaccctannnnnnnaaaaaaaaaaaaaaaaaaaaaaaaaaaaaaaaaa

SEQ ID NO: 164 - DNA, 2789 bp, Homo sapiens
gggggagccatgaggcgccagcctgcgaaggtggcggcgctgctgctcgggctgctcttggagtgcacagaagccaaaaagcattgctggtatttcgaaggactctatccaacctattatatatgccgctcctacgaggactgctgtggctccaggtgctgtgtgcgggccctctccatacagaggctgtggtacttctggttccttctgatgatgggcgtgcttttctgctgcggagccggcttcttcatccggaggcgcatgtaccccccgccgctgatcgaggagccagccttcaatgtgtcctacaccaggcagcccccaaatcccggcccaggagcccagcagccggggccgccctattacactgacccaggaggaccggggatgaaccctgtcgggaattccacggcaatggctttccaggtcccacccaactcaccccaggggagtgtggcctgcccgccccctccagcctactgcaacacgcctccgcccccgtacgaacaggtagtgaaggccaagtagtggggtgcccacgtgcaagaggagagacaggagagggcctttccctggcctttctgtcttcgttgatgttcacttccaggaacggtctcgtgggctgctaagggcagttcctctgatatcctcacagcaagcacagctctctttcaggctttccatggagtacaatatatgaactcacactttgtctcctctgttgcttctgtttctgacgcagtctgtgctctcacatggtagtgtggtgacagtccccgagggctgacgtccttacggtggcgtgaccagatctacaggagagagactgagaggaagaaggcagtgctggaggtgcaggtggcatgtagaggggccaggccgagcatcccaggcaagcatccttctgcccgggtattaataggaagccccatgccgggcggctcagccgatgaagcagcagccgactgagctgagcccagcaggtcatctgctccagcctgtcctctcgtcagccttcctcttccagaagctgttggagagacattcaggagagagcaagccccttgtcatgtttctgtctctgttcatatcctaaagatagacttctcctgcaccgccagggaaggatagcacgtgcagctctcaccgcaggatggggcctagaatcaggcttgccttggaggcctgacagtgatctgacatccactaagcaaatttatttaaattcatgggaaatcacttcctgccccaaactgagacattgcattttgtgagctcttggtctgatttggagaaaggactgttacccatttttttggtgtgtttatggaagtgcatgtagagcgtcctgccctttgaaatcagactgggtgtgtgtcttccctggacatcactgcctctccagggcattctcaggcccgggggtctccttccctcaggcagctccagtggtgggttctgaagggtgctttcaaaacggggcacatctggccgggaagtcacatggactcttccagggagagagaccagctgaggcgtctctctctgaggttgtgttgggtctaagcgggtgtgtgctgggctccaaggaggaggagcttgctgggaaaagacaggagaagtactgactcaactgcactgaccatgttgtcataattagaataaagaagaagtggtcggaaatgcacattcctggataggaatcacagctcaccccaggatctcacaggtagtctcctgagtagttgacggctagcggggagctagttccgccgcatagttatagtgttgatgtgtgaacgctgacctgtcctgtgtgctaagagctatgcagcttagctgaggcgcctagattactagatgtgctgtatcacggggaatgaggtgggggtgcttattttttaatgaactaatcagagcctcttgagaaattgttactcattgaactggagcatcaagacatctcatggaagtggatacggagtgatttggtgtccatgcttttcactctgaggacatttaatcggagaacctcctggggaattttgtgggagacacttgggaacaaaacagacaccctgggaatgcagttgcaagcacagatgctgccaccagtgtctctgaccaccctggtgtgactgctgactgccagcgtggtacctcccatgctgcaggcctccatctaaatgagacaacaaagcacaatgttcactgtttacaaccaagacaactgcgtgggtccaaacactcctcttcctccaggtcatttgttttgcatttttaatgtctttattttttgtaatgaaaaagcacactaagctgcccctggaatcgggtgcagctgaataggcacccaaaagtccgtgactaaattccgtttgtctttttgatagcaaattatgttaagagacagtgatggctagggctcaacaattttgtattcccatgtttgtgtgagacagagtttgttttcccttgaacttggttagaattgtgctactgtgaacgctgatcctgcatatggaagtcccactttggtgacatttcctggccattcttgtttccattgtgtggatggtgggttgtgcccacttcctggagtgagacagctcctggtgtgtagaattcccggagcgtccgtggttcagagtaaacttgaagcagatctgtgcatgcttttcctctgcagcaattggctcgtttctcttttttgttctcttttgataggatcctgtttcctatgtgtgcaaaataaaaataaatttgggcaaaaaaaaaaaaaaaaaaaa

SEQ ID NO: 165 - DNA, 2008 bp, Homo sapiens
cacatcaggcccagctctatcactggggagggagataggctgccagggacagaaagggctctttgagaaggccactctgcctggagtgggggcgccgggcactgtcccccaaggtcgcggcagaggagataggggtctgtcctgcacaaacaccccaccttccactcggctcacttaaggcaggcagcccagcccctggcagcacccacgatgcgggacctgcctctcaccagcctggccctagtgctgtctgccctgggggctctgctggggactgaggccctcagagcagaggagccagctgtgggcaccagtggcctcatcttccgagaagacttggactggcctccaggcatcccacaagagcctctgtgcctggtggcactgggcggggacagcaatggcagcagctcccccctgcgggtggtgggggctctaagcgcctatgagcaggccttcctgggggccgtgcagagggcccgctggggcccccgagacctggccaccttcggggtctgcaacaccggtgacaggcaggctgccttgccctctctacggcggctgggggcctggctgcgggaccctggggggcagcgcctggtggtcctacacctggaggaagtgacctgggagccaacaccctcgctgaggttccaggagcccccgcctggaggagctggccccccagagctggcgctgctggtgctgtaccctgggcctggccctgaggtcactgtgacgagggctgggctgccgggtgcccagagcctctgcccctcccgagacacccgctacctggtgttagcggtggaccgccctgcgggggcctggcgcggctccgggctggccttgaccctgcagccccgcggagaggactcccggctgagtaccgcccggctgcaggcactgctgttcggcgacgaccaccgctgcttcacacggatgaccccggccctgctcctgctgccgcggtccgagcccgcgccgctgcctgcgcacggccagctggacaccgtgcccttcccgccgcccaggccatccgcggaactcgaggagtcgccacccagcgcagaccccttcctggagacgctcacgcgcctggtgcgggcgctgcgggtccccccggcccgggcctccgcgccgcgcctggccctggatccggacgcgctggccggcttcccgcagggcctagtcaacctgtcggaccccgcggcgctggagcgcctactcgacggcgaggagccgctgctgctgctgctgaggcccactgcggccaccaccggggatcctgcgcccctgcacgaccccacgtcggcgccgtgggccacggccctggcgcgccgcgtggctgctgaactgcaagcggcggctgccgagctgcgaagcctcccgggtctgcctccggccacagccccgctgctggcgcgcctgctcgcgctctgcccaggaggccccggcggcctcggcgatcccctgcgagcgctgctgctcctgaaggcgctgcagggcctgcgcgtggagtggcgcgggcgggatccgcgcgggccgggtcgggcacagcgcagcgcgggggccaccgccgccgacgggccgtgcgcgctgcgcgagctcagcgtagacctccgcgccgagcgctccgtactcatccccgagacctaccaggccaacaattgccagggcgtgtgcggctggcctcagtccgaccgcaacccgcgctacggcaaccacgtggtgctgctgctgaagatgcaggcccgtggggccgccctggcgcgcccaccctgctgcgtgcccaccgcctacgcgggcaagctgctcatcagcctgtcggaggaacgcatcagcgcgcaccacgtgcccaacatggtggccaccgagtgtggctgccggtgacccctgcgccgcgcggactcctgccccgagggtccggacgcgccccagctcgcgccccttcccatatttattcggaccccaagcatcgccccaataaagaccagcaagcaaccgg

SEQ ID NO: 166 - DNA, 343 bp, Homo sapiens
cgcgcggtgtggtggcagcaggcgcaccaagcctcgaaatgcagaacgacgccggcgagttcgtggacctgtacgtgccgcggaaatgctccgctagcaatcgcatcatcggtgccaaggaccacgcatccatccagatgaacgtggccgaggttgacaaggtcacaggcaggtttaatggccagtttaaaacttatgctatctgcggggccattcgtaggatgggtgagtcagatgattccattctccgattggccaaggccgatggcatcgtctcaaagaacttttgactggagagaatcacagatgtggaatatttgtcataaataaataatgaaaacct

SEQ ID NO: 167 - DNA, 2025 bp, Homo sapiens
ggcagcggtggcaggggctgcaggagcaagtgaccaggagcaggactggggacaggcctgatcgcccctgcacgaaccagacccttcgccgccctcacgatgactacctctccgatcctgcagctgctgctgcggctctcactgtgcgggctgctgctccagagggcggagacaggctctaaggggcagacggcgggggagctgtaccagcgctgggaacggtaccgcagggagtgccaggagaccttggcagccgcggaaccgccttcaggcctcgcctgtaacgggtccttcgatatgtacgtctgctgggactatgctgcacccaatgccactgcccgtgcgtcctgcccctggtacctgccctggcaccaccatgtggctgcaggtttcgtcctccgccagtgtggcagtgatggccaatggggactttggagagaccatacacaatgtgagaacccagagaagaatgaggcctttctggaccaaaggctcatcttggagcggttgcaggtcatgtacactgtcggctactccctgtctctcgccacactgctgctagccctgctcatcttgagtttgttcaggcggctacattgcactagaaactatatccacatcaacctgttcacgtctttcatgctgcgagctgcggccattctcagccgagaccgtctgctacctcgacctggcccctaccttggggaccaggcccttgcgctgtggaaccaggccctcgctgcctgccgcacggcccagatcgtgacccagtactgcgtgggtgccaactacacgtggctgctggtggagggcgtctacctgcacagtctcctggtgctcgtgggaggctccgaggagggccacttccgctactacctgctcctcggctggggggcccccgcgcttttcgtcattccctgggtgatcgtcaggtacctgtacgagaacacgcagtgctgggagcgcaacgaagtcaaggccatttggtggattatacggacccccatcctcatgaccatcttgattaatttcctcatttttatccgcattcttggcattctcctgtccaagctgaggacacggcaaatgcgctgccgggattaccggctgaggctggctcgctccacgctgacgctggtgcccctgctgggtgtccacgaggtggtgtttgctcccgtgacagaggaacaggcccggggcgccctgcgcttcgccaagctcggctttgagatcttcctcagctccttccagggcttcctggtcagcgtcctctactgcttcatcaacaaggaggtgcagtcggagatccgccgtggctggcaccactgccgcctgcgccgcagcctgggcgaggagcaacgccagctcccggagcgcgccttccgggccctgccctccggctccggcccgggcgaggtccccaccagccgcggcttgtcctcggggaccctcccagggcctgggaatgaggccagccgggagttggaaagttactgctagggggcgggatccccgtgtctgttcagttagcatggatttattgagtgccaactgcgtgccaggcccagtacggaggacgctggggaaatggtgaaggaaacagaaaaaaggtccctgcccttctggagatgacaactgagtggggaaaacagaccgtgaacacaaaacatcaagttccacacacgctatggaatggttatgaagggaagcgagaagggggcctagggtggtctgggaggcgtctccaaggaggtgacacttaagccatccccgaaagaggtgaaagagatcactttggggagagctggagaacaggattctaggcggaagcgatagcataggcaaaggcccttgggcaggaaggcgctcagccttggctggagtagaattaagtcagagccaacaggttggggagagacagagaagtgggcaggggcacccaagttgggatttcatttcaggtgcattggagattcttaggagtgtctcttgggggtaatattttattttttaaaaaatgaggat

SEQ ID NO: 168 - DNA, 3163 bp, Homo sapiens
tcgtgttaagaaacaagaaaggtcagggtggctgtggttggaacctccaacaggaaggttattcttcccacggatccaaaggctgtacaagggcaaagacactacagctgcctgaagttagtgctttaggatatggagcataaagagaggaaaagatgagatccacttggataccagcaccccactccagcctcgaggaagcttttacacagtctgccatggttttacacagtttaaaactggaagacagattctgctgattttcttttaatccgatctcacaaagcagcagaatggattcaaaattaccctgaaaacgttggaagacagtcttctctctcgcctctcctccgcctctgggaacttcctgggagaaacagtgctggtggaaaacctagagatcaccaagcagactgctgccgaagttgagaaaaaggtccagggggccaaggtgactgaagtgaaaatcaacgaggcccgagagcactaccggccagcagctgccagggcctcactgctctacttcatcatgaacgacctcagcaagatccatccaatgtaccagttttctctcaaggccttcagtatcgtcttccagaaggctgtggagagggctgctcctgacgaaagcctcagggagcgggtggccaacctaatagacagcataaccttctctgtgtaccagtacaccatccgcgggctctttgagtgtgataagctgacctaccttgcccagctcacctttcagattctcctcatgaaccgagaagtcaatgcagtggagttggatttcctgcttcgatctccagtgcagacgggcaccgccagccccgtggagttcctctcccatcaggcgtggggagctgtcaaggtactttcatcaatggaagaattctctaatctggatcgggacatagagggatctgctaagagctggaaaaagtttgtggagtccgaatgtcctgagaaagagaagctcccacaggagtggaagaacaagacagccctgcagcgcctctgcatgctgagagccatgcggcccgaccggatgacctatgctttgcgagattttgttgaagagaagttaggaagcaaatacgtggtgggaagagccctagattttgcaacctcatttgaagaatcgggaccagccactcctatgtttttcatcctgtctccaggggtggacccactgaaggatgtagaaagtcaaggaagaaaacttggatacaccttcaacaatcagaactttcacaacgtgtctttggggcaaggacaggaagtggtggctgaggctgcgctggacctcgctgccaagaaaggtcactgggttattttgcagaacattcacctggtggccaagtggctcagcaccctggagaagaagctggaggagcacagtgagaacagccacccagagttcagggtcttcatgagtgcagagccagcaccctcccctgagggccacatcatcccccagggcatcctggagaactccattaagatcaccaatgagccccccacgggcatgcatgccaacctgcacaaggccctggacaacttcactcaggacactctggagatgtgttctcgggagacggagtttaagagcatcctctttgctctttgttacttccatgcggtggtggcagaaagacgaaaatttgggccccagggatggaatcgctcatacccctttaacactggagacctcactatctctgtgaatgtcctctacaacttcctggaggccaacgcaaaggtcccctatgatgatttgcgctacctgtttggagagatcatgtatggaggccatatcacagatgactgggacagaagactctgcagaacctacctgggggaattcattcgaccagaaatgttagaaggagaactgtctttggccccagggttcccactcccaggcaacatggactacaatggttatcatcagtacatcgatgctgagctgcccccagaatccccctacctctatggcctccacccgaacgcagagattggcttcctgacccaaacctcagaaaagctcttccgcactgtgctggagctgcagcctcgggacagccaggccagagacggagcgggcgccacaagagaagaaaaggtcaaggcacttctggaagaaatattggagcgggtgacagacgagtttaacatcccagaactgatggccaaagtggaggagcgcaccccttacattgtagttgccttccaggagtgtggccggatgaatatcctcaccagagagattcagcgctcactgagggagctggagctcggcttaaagggggagctgactatgaccagccacatggagaacttacagaatgccctgtacttcgatatggtgccagagtcctgggctagacgagcctacccttccacagcaggcctggcagcccggtttccagacctcctcaacagaatcaaggagctagaggcttggacgggtgactttacaatcccctccactgtgtggctgacaggcttcttcaacccccagtcgttcctgactgccatcatgcagtccacggctcgcaagaatgagtggccactggaccagatggccctgcaatgtgacatgacgaagaagaacagagaagagtttaggagtcctcctcgggaaggggcctacatccatggcctcttcatggaaggtgcctgctgggacacacaggctgggatcattacagaggcaaagctgaaggatctgacaccccctatgcctgtgatgttcatcaaggccattcctgcagataagcaggactgccgcagtgtctattcctgtcctgtgtacaagactagtcagcggggacccacctacgtgtggactttcaacctgaagactaaggaaaacccatccaagtgggttctggctggagtagccttgcttctccagatttagcatcctgcagagccaccgagaaaataaaaaagctgggcttggaggctgcctagagggacaggtgggtgaagggtcaccacagacacttagaacggtaagaaaccatgagcactcacaattctgtagaattcctctagggaacttggagaggtgtgcctaaggtgaggctgagctgaaggaatgtgggcccaggtttcttaataaaatgatttactcttcaaaaaaaaaaaaaaaaaa

SEQ ID NO: 169 - DNA, 13537 bp, Homo sapiens
  misc_feature (47)..(47): n is a, c, g, or t
  misc_feature (10945)..(10945): n is a, c, g, or t
tgagtcctggccgcgtccccgtcgctagggaaaccgatgcagctggnggccgcgcgcgatgcggctcgcggaggagcgggccgcgctcgcggcggagaacgcggatggggaacccggcgccgaccgacgactgcgactcctggggacctacgtggccatgagcctgcggccggctgcgggcgcctgggagcgttgcgcggggagtgctgaggcggagcagctgctccaggccttcctgggccgcgatgctgccgaggggccgcggccgctgctggtggtgcggcccgggcccaggggcctggcaatacgccccgggctggaggtgggacctgagtcgggcctggctggcgctaaggcgctttttttccttcgcaccgggcccgagcctccagggcccgacagcttccgcggcgcagtggtctgcggggacctgcccgcggcacctctggagcacctagccgcgctgttctcggaggttgttctacctgtcctggccaatgagaagaatcgcctaaactggccccacatgatatgtgaggatgtcaggcggcacgcccacagcctccaatgtgacctctcagttatacttgagcaagtgaagggaaaaactttgctgcctcttccagcaggctcagaaaaaatggagtttgcggattccaaaagtgagacagtcttggattctatagataagtcagtcatctatgccattgagtctgcagtgatcaaatggagctaccaagtccaggtggtactcaagagagagtcttcccagccactcttacaaggggagaatcccacccctaaggtggagttggagttctggaagagcaggtatgaagatctgaaatacatctataatcaactgagaacaataacggtgaggggcatggccaagctcctggacaagcttcagagtagctactttccagctttcaaagccatgtacagagatgttgttgcagctctagcagaggcacaggacatccatgtgcacctgataccgctccagcgccacctggaagctctggagaatgcagaatttccggaggtgaagccccagctgcggcccctgctccacgtggtctgtctgatttgggccacatgcaagtcctaccgctccccgggaaggctgactgtgctgctccaggagatttgcaaccttctcatccagcaggcctctaattatctcagcccagaagacctgctgagaagtgaggtagaagaaagtcagagaaaactgcaagtggtctcagacactttgagcttcttcaagcaagagtttcaggacagaagggagaatctccacacttacttcaaagagaaccaggaagtcaaggaatgggatttccagtcttctttggtctttgtgcgattggatggcttcctgggacgactgcacgtggtggagggtcttctgaagacggccctggatttccacaaactgggaaaggtggagttcagcggcgtcagagggaatgctctgagtcagcaggtccagcaaatgcatgaagaatttcaagagatgtacaggcttctctcaggatcctcctccgactgcctgtacctccaaagcacggactttgaaaatgacgtctctgaatttaaccagaaagtagaagatcttgaccgaagattggggactatctttattcaagcttttgatgatgcacctggcttggagcatgcctttaagctgctagacatagcaggaaacctccttgaaagaccgctggtagcgagggatacatctgataaatacctggtcctcatccaaatgttcaacaaagatctggatgcagtgaggatgatctacagtcagcacgtccaggaggaagcagaacttgggttctccccggtgcacaagaacatgcccaccgtggctggcggcctccgctgggcacaggagctgaggcagcgcatccagggtcctttcagcaactttggacgcatcacacacccttgcatggaatctgcagaaggaaagcgaatgcaacaaaaatatgaagatatgctgtcattgctagaaaagtatgagacaagactttatgaggattggtgccggacagtatcagagaagtcacagtacaatctttcccaaccacttctaaaacgtgacccagagacgaaggagatcactatcaactttaacccacagctgatttcagtgctgaaagaaatgagctatcttgaacccagagagatgaaacacatgcctgagacagcagcagccatgttctcctccagggatttctatcggcagcttgtggctaatttagagttgatggcaaattggtacaacaaggttatgaaaactctgctggaggtggaatttccattagtggaggaagagctgcaaaatattgatctccgcctcagagcagcagaggagactttgaactggaaaacagaaggcatttgcgattatgtcactgaaatcaccagtagtattcatgatcttgaacaaagaattcagaaaactaaagacaatgtggaagagatccaaaacatcatgaaaacatgggtgactccaatatttaagacaaaagatggaaaaagggaatcccttctttctctggatgatcggcatgatcgaatggaaaaatattacaatctcatcaaggaatctggccttaagatccacgcccttgttcaggaaaacctgggtctattttcagcagacccaacctccaatatctggaagacttatgttaactctattgacaatttgttgctgaatggattctttcttgccattgagtgctccctcaagtatcttctggaaaatactgagtgtaaggcaggacttaccccaatatttgaagcacaactgagtctagccatcccagagctagttttctatccgtctctggagtctggagtgaaggggggtttctgtgacattgttgagggtctcatcaccagcatttttaggataccatctctggtgccacggctttccccacaaaatggctctcctcactatcaggtcgacctggacggtataccagatttggcaaacatgcggcgcacactcatggagagagtccagagaatgatgggcctctgctgtggctatcagagcaccttcagccagtattcgtacctctatgtggaggaccggaaggaggttctgggtcagtttctgctgtacgggcacatcctcactccggaagaaattgaagaccatgtggaagatggcatcccagagaaccctcccctcctttctcagtttaaagtgcaaatcgactcctatgaaacgctctatgaagaggtgtgcaggctggaacccatcaaggtgtttgacggctggatgaaaattgatattcgaccctttaaggcatctctgctgaatattattaagaggtggagcctcctgttcaaacagcatcttgtggaccacgtcactcacagcttggccaacctggacgcgtttataaagaagagtgagagcggcttactcaagaaagttgaaaaaggagatttccaaggcttggttgagatcatgggacaccttatggctgttaaagaacggcagagtaacactgatgagatgtttgagcccttaaagcagactattgaattgctgaagacctatgaacaagaattgccagaaacagtgtttaagcagctggaggagctgcctgagaaatggaacaacataaaaaaggtggccattactgtgaagcagcaggtggccccactgcaggcaaatgaagtgacactcctccgccagaggtgcacagccttcgatgcagaacagcagcaattctgggagcaattccacaaagaagccccgttcaggtttgatagcatccaccctcatcaaatgctggatgccaggcacatcgagatccagcagatggaatccactatggcctccatttctgagtctgccagcttatttgaagtcaatgtccctgactataagcagctgaggcagtgcaggaaggaggtctgccagctgaaggagctctgggacaccattggaatggtgacctccagcatccatgcctgggagaccacaccctggaggaatatcaacgtggaagccatggagttggagtgcaaacagtttgcccggcatatccgaaacctggacaaggaggtcagggcctgggatgcattcacaggcctggaaagcactgtgtggaacacgctgagctccctgagggcagtagctgagctgcagaatccagccatccgggagcggcactggaggcagctgatgcaggccaccggtgtgagcttcactatggaccaggacaccaccctagcgcacctgctgcagctccagctgcaccactatgaggatgaggtccggggcattgtggacaaagctgcaaaagagatgggtatggagaaaaccttaaaggagctgcagactacctgggctggcatggaattccagtatgagccccacccacggaccaatgtccccctcctgtgctctgatgaggacctcatagaggttctggaggataatcaagttcaacttcagaacctggtgatgtccaagtatgttgctttcttcttggaggaggtgtcgggctggcagaagaagctgtccacagtggacgctgtcatctctatctggtttgaagtgcagcgaacatggactcacctggaaagcatattcactggatctgaagatattcgggcacagctaccccaggattctaaaaggtttgaaggcatcgacattgactttaaagagctagcttatgatgcccagaaaattccaaatgtagtgcaaaccaccaacaagccaggcctgtatgaaaagctggaggatattcagggcagattgtgcctgtgtgagaaggccctggcagagtacctcgacaccaagaggcttgccttcccgcggttttactttctctcctcctccgatctgttagacatcctttccaacggcacagctccacaacaggttcaacgtcacctttccaaactctttgacaacatggccaagatgcgattccagctagatgccagtggggaaccaaccaagacaagcctcggcatgtacagcaaagaagaggagtatgtggctttcagtgagccctgtgactgcagcgggcaggtagaaatatggctgaaccatgtccttggtcacatgaaggccactgtgaggcatgagatgacagaaggtgtaactgcctatgaagaaaagccgagggagcagtggctttttgaccacccagctcaggtggccctgacctgtactcagatctggtggacaacagaagtgggcatggcatttgccaggctggaggaaggctatgagagtgccatgaaggactattataagaagcaagtggcccagctcaaaacccttatcaccatgctgattggccagctctccaagggagaccggcagaagattatgactatatgcaccatcgatgtgcatgcccgggatgtggtagccaagatgattgctcagaaggtagacaatgcccaggctttcctctggctgtctcagctgcgccatcgttgggatgacgaggtcaaacactgctttgccaacatctgtgatgcccagtttttgtattcctatgagtacctgggaaacacacctcgcttggtgatcacacctttgactgacaggtgctacatcaccctcacccagtccctgcacctgaccatgagtggggctcccgcaggacctgcaggcacaggcaagaccgagaccaccaaggacctgggccgcgcactgggcatcctggtctatgtgttcaactgctcggagcagatggattacaagtcttgtggcaacatctacaaaggccttgctcagactggtgcctggggctgctttgatgagtttaatcgaatctccgtggaggtcttgtcagtggtggcagtgcaggtaaaaagcattcaagatgcgattagagataagaagcagtggttcagcttccttggggaggagatcagcctgaatccttctgtcggtatcttcatcaccatgaacccaggctatgctggccgcacagagctgccagagaatctcaagtctctcttcaggccttgtgcaatggtggttccagactttgaattgatctgtgaaatcatgctggtggcagaaggattcattgaagcccagtcattagccagaaagttcatcactctttaccagttgtgcaaagagcttctctccaaacaggatcactacgactggggcctacgggccatcaagtccgtgctggtggtggcaggatccctgaagagaggagaccctgaccggcctgaggaccaggtcctgatgcgctccttgcgggatttcaacatccccaagattgtgactgatgacatgcccatcttcatgggcctgatcggggacctctttcccgccctggatgtcccccggaggagagaccccaacttcgaagctttggttaggaaggcgatagtggatctgaagctccaggctgaggacaactttgtgctcaaggtggtccagctggaggagctcctggctgtgcggcactctgtatttgtggtgggtggcgctggtaccggcaagtcacaggtgctgaggtccttgcacaagacctatcagatcatgaaacggcgccccgtctggactgacctcaatcccaaagcagtcacaaatgatgagctctttggcatcatcaatccagccacaggagaatggaaggatggattgttctcttccatcatgcgggagcttgccaacatcacccatgatgggcccaagtggattttactggatggcgacatagatccaatgtggattgaatccctgaatactgtcatggatgataacaaggtgctgacattggccagcaatgagaggattcctctgaaccccaccatgaagctcctctttgagatcagccacctgcgcacagccactccagcaactgtctctagagcagggatcttgtacatcaacccggcagacttgggatggaaccctccagtgagcagctggattgagaagagggaaatccagacagagagagccaacttaaccattttgttcgacaagtatcttccaacctgcctagacacactcagaaccaggtttaagaagatcattcccatcccagagcagagcatggttcagatggtgtgtcaccttctggaatgtctcctgaccacggaggacatccctgcagactgccctaaggaaatttatgagcattattttgtgtttgctgccatctgggctttcggcggagcaatggtccaagatcagcttgtggactaccgggcagagttcagcaaatggtggctgactgagttcaaaacagtcaagtttccttcccaaggaaccatctttgactattacatcgacccagagaccaagaaattcgagccttggtccaagctcgtcccccagttcgaatttgaccccgagatgcccttgcaggcgtgtttggtgcacacgagtgagaccatccgtgtgtgctacttcatggagcggttgatggcgcggcagcggcctgtcatgctggtgggcacggctggcactggcaagtcggtgctggtgggagctaagctggccagccttgaccccgaggcatacctggtgaaaaacttgccattcaactactacaccacgtcagcaatgctgcaggctgtcctggagaagcctctggaaaagaaggctggcagaaactatggccctccagggaacaagaaactcatctatttcattgatgacatgaacatgcctgaggtggatgcctacgggacggtgcagccccacaccatcatccggcagcatctggactatggccactggtatgatcggagcaagctgtccctaaaggagatcacaaatgtacagtatgtttcctgtatgaaccccacggcaggcagcttcaccatcaacccccggcttcagcgtcacttcagcgtgtttgtcctctccttcccgggggcagatgccctgtcctctatctacagcatcatcctcactcagcatctgaagctcggaaacttcccggcgtccctgcagaaatccatccccccactgatcgatctggccctcgccttccaccagaaaattgctaccaccttcctacccacaggaatcaaattccactacatcttcaacctcagagattttgccaacattttccagggcattctcttctcctcagtggaatgtgtgaaatccacatgggatcttataaggctctatctgcatgaatcaaatcgagtttatcgggataagatggtagaagaaaaggactttgatctttttgataaaatccagacagaagtgctcaagaaaacttttgatgatattgaagaccctgtggagcagacccaaagcccgaacctgtattgtcactttgcaaatggtattggggagcccaaatacatgcctgtacagtcttgggaacttttgacccagactctggtggaggccttggagaaccacaatgaagtcaacacagtgatggacctagttctctttgaggatgccatgcgccatgtctgccatatcaatcgcatcttggagtccccgcggggaaatgctctgctggttggtgtaggtgggagcggcaagcagagcctgacaaggctggcagctttcatcagctccatggatgtcttccagatcacactgcgcaaaggctaccagatccaggacttcaagatggacctggccagcctgtgtctgaaagctggagtgaagaatctcaacacagtgtttctcatgactgatgcccaagtggctgatgagaggttccttgtgctcatcaatgatcttttggcatctggggagatcccagatctctactctgatgatgaagttgaaaacatcataagcaatgtgaggaatgaagtcaagagccagggtctggttgacaacagagagaactgttggaagttctttatagatcggatccggcgacagctgaaggtgactctctgtttctcccctgtgggaaacaagctaagagtccgcagcaggaagttcccagccattgtgaactgcacagccatccactggttccacgagtggcctcagcaagcattggagtctgtcagcctccgcttcttgcagaacacagagggcattgagcccacagtaaagcagtcgattagcaaattcatggcctttgtccacacaagtgtcaaccaaacatcccagtcttatctgagcaatgaacagcgctacaactatacaactcccaagtcctttctggagttcatcagactctaccagagcttgttgcacaggcacagaaaagagctcaagtgcaagacagagcggttggagaacgggctgctgaagctgcatagcacctctgcccaggtggatgatctgaaagcaaagctggctgcccaggaagtagagctgaagcagaaaaatgaagatgcagacaaactgattcaggtcgtgggtgtggagactgacaaagtgagcagagagaaagccatggcagatgaagaggagcagaaggtggccgtcatcatgctagaggtgaaacagaagcagaaggactgtgaggaggacctggcaaaggctgagccagcactcacagcagcgcaggcagctctcaacaccctgaacaagaccaacctgacagagctgaagtcatttggctctccgcctctggccgtcagcaatgtcagcgctgcggtgatggtactgatggctcccaggggtagggtgcccaaggaccggagctggaaggctgctaaggtcaccatggccaaagtggatggcttcctggactcgctaataaacttcaacaaagagaacattcacgagaactgcctcaaagccatcaggccgtatctgcaagaccccgagttcaatcctgagtttgtggccaccaaatcctatgcggctgcaggcctctgctcctgggtcatcaatattgtgagattttatgaggtgttctgtgatgtggaacccaagcgccaggcactgaacaaagccaccgcggacctcacagctgcccaggagaagctggctgccatcaaagccaagatcgctcaccttaatgaaaacctggcaaagctcacagccaggtttgagaaagcaacagcagacaaactcaaatgtcagcaagaagccgaagtgaccgcagtcaccatctcccttgccaaccgcctggttggaggactcgcttctgaaaacgtgaggtgggcagatgccgtgcagaacttcaaacagcaggaaaggacgttatgtggagacattttacttataacggctttcatttcctaccttggcttcttcacaaagaaataccggcagagcctcctggacagaacttggaggccctacctgagccagctgaaaactcccattccagtcaccccagccctggatcccctgaggatgctgatggatgatgctgacgtggctgcctggcagaacgagggcctcccagccgaccgcatgtccgtggagaatgccaccattctcatcaactgtgagcgctggccactcatggttgaccctcagctacaaggcatcaaatggatcaagaataaatatggtgaagatctccgggtcacgcagattggtcagaaaggctaccttcaaatcatagagcaggccctggaagctggagctgtggtgctgattgaaaatctagaggagtccattgatcctgttctgggacccctgcttgggagagaagtcattaaaaaaggacgattcattaaaattggagacaaagaatgtgaatacaatcccaagttccggctcatcctccacaccaagctggctaatcctcactaccagcctgagctgcaggctcaggccaccctgatcaacttcaccgtgaccagggatggcctggaggaccagttgctggccgctgtggtcagcatggagaggccagacttggagcagctgaagtccgatctcacaaagcagcagaatggattcaaaatcaccctgaaaacgttggaagacagtcttctctctcgcctctcctcngcctctgggaacttcctgggagaaacagtgctggtggaaaacctagagatcaccaagcagactgctgccgaagttgagaaaaaggtccaggaggccaaggtgactgaagtgaaaatcaacgaggcccgagagcactaccggccaacagctgccagggcctcactgctctacttcatcatgaacgacctcagcaagatccatccaatgtaccagttttctctcaaggccttcagtatcgtcttccagaaggctgtggagagggctgctcctgacgaaagcctcagggagcgggtggccaacctaatagacagcataaccttctctgtgtaccagtacaccatccgcgggctctttgagtgtgataagctgacctaccttgcccagctcacctttcagattctcctcatgaaccgagaagtcaatgcagtggagttggatttcctgcttcgatctccagtgcagacgggcaccgccagccccgtggagttcctctcccatcaggcgtggggagctgtcaaggtactttcatcaatggaagaattctctaatctggatcgggacatagagggatctgctaagagctggaaaaagtttgtggagtccgaatgtcctgagaaagagaagctcccacaggagtggaagaacaagacagccctgcagcgcctctgcatgctgagagccatgcggcccgaccggatgacctatgctttgcgagattttgttgaagagaagttaggaagcaaatacgtggtgggaagagccctagattttgcaacctcatttgaagaatcgggaccagccactcctatgtttttcatcctgtctccaggggtggacccactgaaggatgtagaaagtcaaggaagaaaacttggatacaccttcaacaatcagaactttcacaacgtgtctttggggcaaggacaggaagtggtggctgaggctgcgctggacctcgctgccaagaaaggtcactgggttattttgcagaacattcacctggtggccaagtggctcagcaccctggagaagaagctggaggagcacagtgagaacagccacccagagttcagggtcttcatgagtgcagagccagcaccctcccctgagggccacatcatcccccagggcatcctggagaactccattaagatcaccaatgagccccccacgggcatgcatgccaacctgcacaaggccctggacaacttcactcaggacactctggagatgtgttctcgggagacggagtttaagagcatcctctttgctctttgttacttccatgcggtggtggcagaaagacgaaaatttgggccccagggatggaatcgctcatacccctttaacactggagacctcactatctctgtgaatgtcctctacaacttcctggaggccaacgcaaaggtcccctatgatgatttgcgctacctgtttggagagatcatgtatggaggccatatcacagatgactgggacagaagactctgcagaacctacctgggggaattcattcgaccagaaatgttagaaggagaactgtctttggccccagggttcccactcccaggcaacatggactacaatggttatcatcagtacatcgatgctgagctgcccccagaatccccctacctctatggcctccacccgaacgcagagattggcttcctgacccaaacctcagaaaagctcttccgcactgtgctggagctgcagcctcgggacagccaggccagagacggagcgggcgccacaagagaagaaaaggtcaaggcacttctggaagaaatattggagcgggtgacagacgagtttaacatcccagaactgatggccaaagtggaggagcgcaccccttacattgtagttgccttccaggagtgtggccggatgaatatcctcaccagagagattcagcgctcactgagggagctggagctcggcttaaagggggagctgactatgaccagccacatggagaacttacagaatgccctgtacttcgatatggtgccagagtcctgggctagacgagcctacccttccacagcaggcctggcagcctggtttccagacctcctcaacagaatcaaggagctagaggcttggacgggtgactttacaatgccctccactgtgtggctgacaggcttcttcaacccccagtcgttcctgactgccatcatgcagtccacggctcgcaagaatgagtggccactggaccagatagccctgcaatgtgacatgacgaagaagaacagagaagagtttaggagtcctcctcgggaaggggcctacatccatggcctcttcatggaaggtgcctgctgggacacacaggctgggatcattacagaggcaaagctgaaggatctgacaccccctatgcctgtgatgttcatcaaggccattcctgcagataagcaggactgccgcagtgtctattcctgtcctgtgtacaagactagtcagcggggacccacctacgtgtggactttcaacctgaagactaaggaaaacccatccaagtgggttctggctggagtagccttgcttctccagatttagcatcctgcagagccaccg

SEQ ID NO: 170 - DNA, 4739 bp, Homo sapiens
ggggagataggtaggagtagcgtggtaagggcgatgagtgtgggccgggcgggagtgcggcgagagccggctggctgagcttagcgtccgaggaggcggcggcggcggcggcggcagcggcggcggcggggctgtggggcggtgcggaagcgagaggcgaggagcgcgcgggccgtggccagagtctggcggcggcctggcggagcggagagcagcgcccgcgcctcgccgtgcggaggagccccgcacacaatagcggcgcgcgcagcccgcgcccttccccccggcgcgccccgccccgcgcgccgagcgccccgctccgcctcacctgccaccagggagtgggcgggcattgttcgccgccgccgccgccgcgcggggccatgggggccgcccggcgcccggggccgggcctggcgaggccgccgcgccgccgctgagacgggccccgcgcgcagcccggcggcgcaggtaaggccggccgcgccatggtggacccggtgggcttcgcggaggcgtggaaggcgcagttcccggactcagagcccccgcgcatggagctgcgctcagtgggcgacatcgagcaggagctggagcgctgcaaggcctccattcggcgcctggagcaggaggtgaaccaggagcgcttccgcatgatctacctgcagacgttgctggccaaggaaaagaagagctatgaccggcagcgatggggcttccggcgcgcggcgcaggcccccgacggcgcctccgagccccgagcgtccgcgtcgcgcccgcagccagcgcccgccgacggagccgacccgccgcccgccgaggagcccgaggcccggcccgacggcgagggttctccgggtaaggccaggcccgggaccgcccgcaggcccggggcagccgcgtcgggggaacgggacgaccggggaccccccgccagcgtggcggcgctcaggtccaacttcgagcggatccgcaagggccatggccagcccggggcggacgccgagaagcccttctacgtgaacgtcgagtttcaccacgagcgcggcctggtgaaggtcaacgacaaagaggtgtcggaccgcatcagctccctgggcagccaggccatgcagatggagcgcaaaaagtcccagcacggcgcgggctcgagcgtgggggatgcatccaggcccccttaccggggacgctcctcggagagcagctgcggcgtcgacggcgactacgaggacgccgagttgaacccccgcttcctgaaggacaacctgatcgacgccaatggcggtagcaggcccccttggccgcccctggagtaccagccctaccagagcatctacgtcgggggcatgatggaaggggagggcaagggcccgctcctgcgcagccagagcacctctgagcaggagaagcgccttacctggccccgcaggtcctactccccccggagttttgaggattgcggaggcggctataccccggactgcagctccaatgagaacctcacctccagcgaggaggacttctcctctggccagtccagccgcgtgtccccaagccccaccacctaccgcatgttccgggacaaaagccgctctccctcgcagaactcgcaacagtccttcgacagcagcagtccccccacgccgcagtgccataagcggcaccggcactgcccggttgtcgtgtccgaggccaccatcgtgggcgtccgcaagaccgggcagatctggcccaacgatggcgagggcgccttccatggagacgcagatggctcgttcggaacaccacctggatacggctgcgctgcagaccgggcagaggagcagcgccggcaccaagatgggctgccctacattgatgactcgccctcctcatcgccccacctcagcagcaagggcaggggcagccgggatgcgctggtctcgggagccctggagtccactaaagcgagtgagctggacttggaaaagggcttggagatgagaaaatgggtcctgtcgggaatcctggctagcgaggagacttacctgagccacctggaggcactgctgctgcccatgaagcctttgaaagccgctgccaccacctctcagccggtgctgacgagtcagcagatcgagaccatcttcttcaaagtgcctgagctctacgagatccacaaggagttctatgatgggctcttcccccgcgtgcagcagtggagccaccagcagcgggtgggcgacctcttccagaagctggccagccagctgggtgtgtaccgggccttcgtggacaactacggagttgccatggaaatggctgagaagtgctgtcaggccaatgctcagtttgcagaaatctccgagaacctgagagccagaagcaacaaagatgccaaggatccaacgaccaagaactctctggaaactctgctctacaagcctgtggaccgtgtgacgaggagcacgctggtcctccatgacttgctgaagcacactcctgccagccaccctgaccaccccttgctgcaggacgccctccgcatctcacagaacttcctgtccagcatcaatgaggagatcacaccccgacggcagtccatgacggtgaagaagggagagcaccggcagctgctgaaggacagcttcatggtggagctggtggagggggcccgcaagctgcgccacgtcttcctgttcaccgagctgcttctctgcaccaagctcaagaagcagagcggaggcaaaacgcagcagtatgactgcaaatggtacattccgctcacggatctcagcttccagatggtggatgaactggaggcagtgcccaacatccccctggtgcccgatgaggagctggacgctttgaagatcaagatctcccagatcaagagtgacatccagagagagaagagggcgaacaagggcagcaaggctacggagaggctgaagaagaagctgtcggagcaggagtcactgctgctgcttatgtctcccagcatggccttcagggtgcacagccgcaacggcaagagttacacgttcctgatctcctctgactatgagcgtgcagagtggagggagaacatccgggagcagcagaagaagtgtttcagaagcttctccctgacatccgtggagctgcagatgctgaccaactcgtgtgtgaaactccagactgtccacagcattccgctgaccatcaataaggaagatgatgagtctccggggctctatgggtttctgaatgtcatcgtccactcagccactggatttaagcagagttcaaatctgtactgcaccctggaggtggattcctttgggtattttgtgaataaagcaaagacgcgcgtctacagggacacagctgagccaaactggaacgaggaatttgagatagagctggagggctcccagaccctgaggatactgtgctatgaaaagtgttacaacaagacgaagatccccaaggaggacggcgagagcacggacagactcatggggaagggccaggtccagctggacccgcaggccctgcaggacagagactggcagcgcaccgtcatcgccatgaatgggatcgaagtaaagctctcggtcaagttcaacagcagggagttcagcttgaagaggatgccgtcccgaaaacagacaggggtcttcggagtcaagattgctgtggtcaccaagagagagaggtccaaggtgccctacatcgtgcgccagtgcgtggaggagatcgagcgccgaggcatggaggaggtgggcatctaccgcgtgtccggtgtggccacggacatccaggcactgaaggcagccttcgacgtcaataacaaggatgtgtcggtgatgatgagcgagatggacgtgaacgccatcgcaggcacgctgaagctgtacttccgtgagctgcccgagcccctcttcactgacgagttctaccccaacttcgcagagggcatcgctctttcagacccggttgcaaaggagagctgcatgctcaacctgctgctgtccctgccggaggccaacctgctcaccttccttttccttctggaccacctgaaaagggtggcagagaaggaggcagtcaataagatgtccctgcacaacctcgccacggtctttggccccacgctgctccggccctccgagaaggagagcaagctccctgccaaccccagccagcctatcaccatgactgacagctggtccttggaggtcatgtcccaggtccaggtgctgctgtacttcctgcagctggaggccatccctgccccggacagcaagagacagagcatcctgttctccaccgaagtctaaaggtcccagtccatctcctggaggcagacagatggcctggaaacctctggctaatcgggccatccgtagagcgggaaccttcctgaggtgtccttgggccacccccaagtgttgggccatctgccaagagacagcgacccaaagccgaaggacaggtggcctgggcagatctcgcccaggtctgggagccccaggctggcctcagactgtggttttttatgtggccacccgagggcgccccaagccagttcatctcagagtccaggcctgaccctgggagacagggtgaagggagtgatttttatgaacttaacttagagtctaaaagatttctactggatcacttgtcaagatgcgccctctctggggagaagggaacgtgaccggattccctcactgttgtatcttgaataaacgctgctgcttcatcctgtg

SEQ ID NO: 171 - DNA, 3833 bp, Homo sapiens
  misc_feature (192)..(192): n is a, c, g, or t
  misc_feature (204)..(204): n is a, c, g, or t
  misc_feature (208)..(208): n is a, c, g, or t
  misc_feature (223)..(223): n is a, c, g, or t
  misc_feature (252)..(252): n is a, c, g, or t
  misc_feature (257)..(257): n is a, c, g, or t
  misc_feature (262)..(262): n is a, c, g, or t
  misc_feature (537)..(539): n is a, c, g, or t
  misc_feature (541)..(541): n is a, c, g, or t
  misc_feature (544)..(546): n is a, c, g, or t
  misc_feature (548)..(548): n is a, c, g, or t
  misc_feature (787)..(787): n is a, c, g, or t
  misc_feature (1055)..(1055): n is a, c, g, or t
  misc_feature (1080)..(1080): n is a, c, g, or t
  misc_feature (1086)..(1086): n is a, c, g, or t
  misc_feature (1096)..(1096): n is a, c, g, or t
  misc_feature (1100)..(1100): n is a, c, g, or t
  misc_feature (1106)..(1107): n is a, c, g, or t
  misc_feature (1113)..(1113): n is a, c, g, or t
  misc_feature (1315)..(1315): n is a, c, g, or t
  misc_feature (1479)..(1479): n is a, c, g, or t
  misc_feature (1627)..(1627): n is a, c, g, or t
  misc_feature (1631)..(1631): n is a, c, g, or t
  misc_feature (1639)..(1639): n is a, c, g, or t
  misc_feature (1642)..(1653): n is a, c, g, or t
  misc_feature (1784)..(1784): n is a, c, g, or t
  misc_feature (2428)..(2428): n is a, c, g, or t
  misc_feature (2562)..(2562): n is a, c, g, or t
  misc_feature (3767)..(3767): n is a, c, g, or t
  misc_feature (3769)..(3781): n is a, c, g, or t
  misc_feature (3787)..(3788): n is a, c, g, or t
  misc_feature (3802)..(3802): n is a, c, g, or t
  misc_feature (3821)..(3821): n is a, c, g, or t
tgcagtatgagatgatctactgtggcgttaggctttattttaatgtaaacataaagcacacatctaaactctgagaaatacaggtagatatgctggtttacctatttgtatagtcaattcctgtttattatgaaacagcgttatctctttgtgtatcttttagctcatatagtcaaaccccatgctgccaanctcaggactaantaanctgagatggggcttnactatctatgacagaataaatgtttaagntgttncaaanccagacatgaatcagtttttctgagtgattggaaacattttggtacgatttatatcctaactctttttgaccattagcagataaatagggactattttcctgctaacaggctattttaaaatatcattaaaaacaaattgtatgcagttgtatatcctgtttcagttgtatatctaattatatgccacattctttcaaaaaattggcttttcattcagttgtcttaaatttggaagacgaatggtaacaatgtctttatgaagatcacaattttnnntnttnnntnttgagtgagacattgaaagctgtgtttatttttttcagtgactgattttctatgtccatagatgctataaaaactgatcgaagatcaactaaaaattcaattacaatattacaaattcaactgcaggtaccaatattacattatttgacagggataataaaatgagcaaagactggaaatcacagacaataacattgctttctcaattaacagaaaggattcataacatattccttaanggtagatgtgatttgtagagaatgtggaaaagaactattgagaagtccacctgctgccccagactgaggcacattagggtggttgtgggaggagttatatttgagggttccatttttccttagggtattaaaatgcatgtcctggtttgttgtttatttgccattaagttctcttcttcaaataaaagaattaggggagaaagtatggaaaagaaacgcactaaacttctggaaaaattaacagaagcttaaaaataacaatttccanaagaatcattctcttcttggtatanagcagntacctgtccntagnttgccnntaactnttttgtactcactggtaaagacagtgattagtaagaccagtgaatttgatacagccacttgaaagaaaaaaaggctgtactacaaatacccatgaaaacagattttctctcacccttccctctgccctcaaggagacagttaaaacaaaactatgacagcatttggtgatttcccacaagagtactgtcaaacctttgaganagtactgctgaatcttcagggaagacctgtagaaagttgaaggccatgagcgaaatgaaagtagttagtttcagagttagaacttctttatgctttctttcaggcataagtgcttttgtgctagttcaggagaaaacacttgcttacactgcttacaccatcancaaaaataatttcagtatggtgagatttgtcgcattttagcaaaatttttaaaaagggttgagtgttaaccattctgacccttttaaaaaacatgcttaaacccatgtaaaagctgtaagtggactaaaaatacattaaaaaagaggntggntcataatnaannnnnnnnnnnnttttatacataggattttattttgcactgctgtaacaatttcattatagaccaagggagaaaaagaaaaaaaggataaaaccaccacactgagtaaattactaaagcttttctactttgtaacaggatttnccatctgatagatttattgtcatatccccttcaaaacagacaagatgctcaccatattttaaagattatagaggttgccactgaaagaaaaattttacacagtcactgtacatcaaggttgaaaaactgtcctgcatgaaaaatatacttagaaatcatgtgaataaaagaaaaaagaaaacattattgtgtttaaggaaagattaaagtcctcataatgtgccatctaaatgtggatactcattcttcttggagtcgctaagatgtagaaatttcttgcttctgcccttttcactcattatactgtgttttttcccaacagtattcattaaggcaaacaaatccctttctgaagaggtcttaaggaaattgtggacaaagcaaacttttggcattaaaacaggttaacatatacaaagcctttgtaatatacattaagcatatttttcttggactagtgacaagaaaagatgaacatgcttgttaacaatgtcaaaaagtttaaaattcagtgtccaagcaattcctaacaatgcttctgtagctttaagctctaaacagtatagaatttatgcaaatgcattaaagaattcaagcttggcaaattacacccaagcaggttattaaactatatatacagaaangtaaatgataaatacagaattaaaagagtccttctgtttccttatagccgtgaaaattgacaaagtttctgaggacagttctataatattaaacattaggtaaccacagatgttgggaaacctaactacacaanccgatttaaaatactcaagatgactttgtagtgtttaatacaattcagttcgtagttaagggcacaagacaacatttaacaaaaataatcacatcaattgacctagaaatcaaatgcaaatagatatgaatacaatctccaaaatctgtcttttaagtgaacattaaccatttattcaaagttatacaagaatttgacggattaaagtcttctgtgacataaagccatttcaaatagtttcatgtctcagctgagcaggaggagagggggtgaaagaataagtgagtaggccccgttgggcagctagacagtaaaaacagactcaacagcagccgcccccagcctgctgtcctccctgattgcctgcatgtgttgcattggtagcagcatgctgagggccaattttaatgccatttgcctcattattaatgtcaaagactccttcttgaattttttcataaatttcttttgctgtattaataaatgcctcttctacattggaagcagtcttagcagacgtttccatgaagatgagtccatgttctcgtgcaaaagcttcaccttcttctttttttacttctcttctagattctaaatcacttttatttccaataagcataatgaccatgttggaattggaatgctggcgggcatcttctaaccaggttgtcaagtggttgaatgtatctctccgtgtaatatcgtaaactagtaaagctcctgctgcacctctgtaatacgaccttgtgatggaacgaaaggattcttgccctgccgtatcccatatctgaagttttatctgtttcccatcaatagttatcattcgagcaccgaactctacaccaatagtaaggtcatgcactggctgaaacctcttgtctgtaaactgtagcaataagcatgatttaccaacacctgtgtcgccgattatgatgtacttgaagagataggcgtacgccatggcacgcggccgctcagtgccagggcacacggctcctcctcccgctgctgctcctcctccgcgccccaaccccggtgccgctcagcctcgaaacgccaggcgccgcccgccgccgccgctgctgctgtcagccgccgggagtgaggggctgtgaggaagccggacgaactgacacccgcagagccgagggagacagcgcccgaccgagcccagccgaacaataacagccgccgcggcgcctccncnnnnnnnnnnnnntcaagnncatcataatcggcnacacaggtgttggtaaatnatgcttattgct

SEQ ID NO: 172 - DNA, 1775 bp, Homo sapiens
  misc_feature (70)..(70): n is a, c, g, or t
  misc_feature (106)..(106): n is a, c, g, or t
  misc_feature (136)..(136): n is a, c, g, or t
  misc_feature (143)..(143): n is a, c, g, or t
  misc_feature (644)..(647): n is a, c, g, or t
  misc_feature (649)..(656): n is a, c, g, or t
  misc_feature (1167)..(1168): n is a, c, g, or t
  misc_feature (1187)..(1187): n is a, c, g, or t
  misc_feature (1355)..(1355): n is a, c, g, or t
  misc_feature (1530)..(1530): n is a, c, g, or t
  misc_feature (1536)..(1536): n is a, c, g, or t
  misc_feature (1538)..(1538): n is a, c, g, or t
  misc_feature (1572)..(1572): n is a, c, g, or t
  misc_feature (1593)..(1593): n is a, c, g, or t
  misc_feature (1666)..(1666): n is a, c, g, or t
  misc_feature (1711)..(1713): n is a, c, g, or t
  misc_feature (1744)..(1745): n is a, c, g, or t
ctcaccaccattacacacacacacatctcttttctcccatcctcccagcgttatagaatcatttgttgtnaaatcagtattcagtatttacataattatgactgantttacatgactactattattcacagttgangtatacngtgtatacagtgtagtttttaaatttttatttttctcagcgttcaaaattatatgttctgttttcttaattttgaaaaatatgcattcactaatttatccccacactctttggaaaatgaaagctctctaggctgtattcaaatacaccaggtactctatcaattttcattttttaaactattctacctgagctctccatctttagccatttcctgttgacttcatactgttctcccctaccactctccctctttaatatattaccgttttagaaactttatggctaccctgtaagtaataaaaatgtctttccccactcaacaacagacagtacctttcaagtttccactttataaggacataacccccattccatttacttcccccgccctccttcaacattcccacttgtattttccggctgtatttttaaaacatggtaaataacatttgcactccactttgtaaccataattaagtatgcccttaaacaataaaannnntnnnnnnnntttgtattttacgattatttaaatgttattcactgaacagccaagctttgtgctactatgggatttcgttttctgcggttccaagtcttgatccacgtcctgccacaggatcactgaagtagagcccattttcttacactctcgccattagttcaaaagcttgcagcattttatgtctggtacttggaggatgattttcctgtacagttttgcgtttttttcaccgaaaatttctgattattattgttttctcttgtgggatgaaatatgtaccttctatatcacagccttaataccttcagcttcttattcattcaaatcttgcttacaatccagtccgaggattcccggtttactgattttctttttcctgcaaattttagccttctgttttgttttgaaataatgcatcctctgcgctttgtcacattctgaaattcgtcaggtgttttaggatgcacactttcttagatcttttcgagggtcttaactgcagttctgtttccggaanngcgtattttctttctaggnattgtaggctcccggccgccccctgaggagctccgctagcagctaagagggcagccacgaagagcgcctgagcactctcgcgagactgtggggctcgccattggctgctccgccgcgccgcaacggaccctgggagtcggccatcatgctggccccggaggccgttancttagtcatggctctaaatatgtacctgcaatcggatgttgaggatcaccgagcccgcgacgtagaagtacgggaagttcatgcgcagctgccaggccagctcgaagaaggcgagcagggtgcgggagagccccttgcagaagacgccgtacgaggtgggtgtcgcggcggggcnttgagncnctgacggccaaggaggacggagccgccgcggggnccatgagccaggtgtcgccgnccgcccagcgtctgtagcgagggttgccgcagggcccgcggacctcctagcgacggctgggaccggcaggacnggtaagcaaagcggctcccgggctcacacccaagcttgccgctgnnnccgccgctcggtgcagtgcggcgcgtagccnnggggggggggaaattaatataattaaggat

SEQ ID NO: 173 - DNA, 746 bp, Homo sapiens
  misc_feature (605)..(605): n is a, c, g, or t
  misc_feature (614)..(614): n is a, c, g, or t
  misc_feature (616)..(617): n is a, c, g, or t
  misc_feature (619)..(621): n is a, c, g, or t
  misc_feature (624)..(625): n is a, c, g, or t
actcactttctgacttaggccacaggtcgttttaccatgtctggacgtggcaagcagggcggcaaggctcgcgccaaggccaaaacccgctcctctagagctgggctccaatttcctgtaggacgagtgcaccgcctgctccgcaagggcaactacgctgagcgggtcggggccggcgcgccggtttacctggcggcggtgctggagtacctaactgccgagatcctggagctggcgggcaacgcagcccgcgacaacaaaaagacccgcatcatcccgcgccacttgcagctggccatccgcaacgacgaggagctcaacaagctgcttggtaaagttaccatcgctcagggcggtgttctgcctaacatccaggccgtactgctccccaagaagactgagagccaccacaaagctaagggcaagtaagggctgaactttaaaaatgtaaacttacaagacaaaaggctcttttcagagccacccaccatttctacggaagaactgagcactctgttctccaaacctatcagaaatttgtggccgagttcaagcactgaggccattactttcctattgggtaaaataaaagtattgaatcaggnctagtaaanannannnaanngctaccttataacatgaaggaacctccttaattgtcccctccccacaaactgtcctgggtctttaaaaaacttggggccgggcgcggtggtttatgcgtccttagcattttgggaaactga

SEQ ID NO: 174 - DNA, 803 bp, Homo sapiens
ttacgtcatgtcgggacgtggcaagcagggcggcaaagctcgcgccaaggctaagacccgttcttcaagggcgggtcttcagttcccagtgggccgagtgcaccgactgctccgcaagggcaactacgctgagcgggtcggtgccggagcgccggtgtacctggcggcggtgttggagtacctaaccgccgagatcctggaactggctggcaacgcggcccgcgacaacaagaagacccgcatcatcccgcgccacttgcagctggccatccgcaacgacgaggagctcaacaagctgcttggtaaagtgaccatcgcccagggtggtgtcctgcccaatatccaggccgtgctgctgcctaagaaaactgagagccaccacaaggccaagggcaagtagcggggctggagcagttcattactcatacctcggtccaaaccaaaaaggttcttttcagagccacctactttttcaccaagtagagctgtgttcagttttatctgatagtcgagtcattttgcaatggcactggaatgctgtatggagatgaagcaaaactaaacggcttttacaccacattgttttgagatagaaagtagacattgaaatgtttacggtacatcaagaaatttaggcgcggcagctcgcgcctgcaatacagctgaaacaataagaaaagtgaggcaagagaataacaaagggagctgaaagttagagggcagaataagtaaaagcaaagggcagaagtaaggtagatgggcgggtgaacaagaagcgagataacaagcagtgaaccttttgc

SEQ ID NO: 175 - DNA, 2289 bp, Homo sapiens
gttattggagtgatgagtaaagaatacataccaaagggcacacgttttggacccctaataggtgaaatctacaccaatgacacagttcctaagaacgccaacaggaaatatttttggagggaaagtgcaagtctggacatgtttatcaagaggaaaagtgacttctcagtaatagactgtcaaattcgggctgctgcccgagtgttcgctttgttatggcagatctattccagaggggagcttcaccacttcattgacggctttaatgaagagaaaagcaactggatgcgctatgtgaatccagcacactctccccgggagcaaaacctggctgcgtgtcagaacgggatgaacatctacttctacaccattaagcccatccctgccaaccaggaacttcttgtgtggtattgtcgggactttgcagaaaggcttcactacccttatcccggagagctgacaatgatgaatctcacacaaacacagagcagtctaaagcaaccgagcactgagaaaaatgaactctgcccaaagaatgtcccaaagagagagtacagcgtgaaagaaatcctaaaattggactccaacccctccaaaggaaaggacctctaccgttctaacatttcacccctcacatcagaaaaggacctcgatgactttagaagacgtgggagccccgaaatgcccttctaccctcgggtcgtttaccccatccgggcccctctgccagaagactttttgaaagcttccctggcctacgggatcgagagacccacgtacatcactcgctcccccattccatcctccaccactccaagcccctctgcaagaagcagccccgaccaaagcctcaagagctccagccctcacagcagccctgggaatacggtgtcccctgtgggccccggctctcaagagcaccgggactcctacgcttacttgaacgcgtcctacggcacggaaggtttgggctcctaccctggctacgcacccctgccccacctcccgccagctttcatcccctcgtacaacgctcactaccccaagttcctcttgcccccctacggcatgaattgtaatggcctgagcgctgtgagcagcatgaatggcatcaacaactttggcctcttcccgaggctgtgccctgtctacagcaatctcctcggtgggggcagcctgccccaccccatgctcaaccccacttctctcccgagctcgctgccctcagatggagcccggaggttgctccagccggagcatcccagggaggtgcttgtcccggcgccccacagtgccttctcctttaccggggccgccgccagcatgaaggacaaggcctgtagccccacaagcgggtctcccacggcgggaacagccgccacggcagaacatgtggtgcagcccaaagctacctcagcagcgatggcagcccccagcagcgacgaagccatgaatctcattaaaaacaaaagaaacatgaccggctacaagacccttccctacccgctgaagaagcagaacggcaagatcaagtacgaatgcaacgtttgcgccaagactttcggccagctctccaatctgaaggtccacctgagagtgcacagtggagaacggcctttcaaatgtcagacttgcaacaagggctttactcagctcgcccacctgcagaaacactacctggtacacacgggagaaaagccacatgaatgccaggtctgccacaagagatttagcagcaccagcaatctcaagacccacctgcgactccattctggagagaaaccataccaatgcaaggtgtgccctgccaagttcacccagtttgtgcacctgaaactgcacaagcgtctgcacacccgggagcggccccacaagtgctcccagtgccacaagaactacatccatctctgtagcctcaaggttcacctgaaagggaactgcgctgcggccccggcgcctgggctgcccttggaagatctgacccgaatcaatgaagaaatcgagaagtttgacatcagtgacaatgctgaccggctcgaggacgtggaggatgacatcagtgtgatctctgtagtggagaaggaaattctggccgtggtcagaaaagagaaagaagaaactggcctgaaagtgtctttgcaaagaaacatggggaatggactcctctcctcagggtgcagcctttatgagtcatcagatctacccctcatgaagttgcctcccagcaacccactacctctggtacctgtaaaggtcaaacaagaaacagttgaaccaatggatccttaa

SEQ ID NO: 176 - DNA, 1165 bp, Homo sapiens
cccagccctggagacagcagcccctagactattgagggacagcgacagcatgaaggctccgggtcggctcgtgctcatcatcctgtgctccgtggtcttctctgccgtctacatcctcctgtgctgctgggccggcctgcccctctgcctggccacctgcctggaccaccacttccccacaggctccaggcccactgtgccgggacccctgcacttcagtggatatagcagtgtgccagatgggaagccgctggtccgcgagccctgccgcagctgtgccgtggtgtccagctccggccaaatgctgggctcaggcctgggtgctgagatcgacagtgccgagtgcgtgttccgcatgaaccaggcgcccaccgtgggctttgaggcggatgtgggccagcgccaagccctgcgtgtcgtctcacacacaagcgtgccgctgctgctgcgcaactattcacactacttccagaaggcccgagacacgctctacatggtgtggggccagggcaggcacatggaccgggtgctcggcggccgcacctaccgcacgctgctgcagctcaccaggatgtaccccggcctgcaggtgtacaccttcacggagcgcatgatggcctactgcgaccagatcttccaggacgagacgggcaagaaccggaggcagtcgggctccttcctcagcaccggctggttcaccatgatcctcgcgctggagctgtgtgaggagatcgtggtctatgggatggtcagcgacagctactgcagggagaagagccacccctcagtgccttaccactactttgagaagggccggctagatgagtgtcagatgtacctggcacacgagcaggcgccccgaagcgcccaccgcttcatcactgagaaggcggtcttctcccgctgggccaagaagaggcccatcgtgttcgcccatccgtcctggaggactgagtagcttccgtcgtcctgccagccgccatgccgttgcgaggcctccgggatgtcccatcccaagccatcacactccacaaaaacatttaatttatggatcctgcctcctgccacgtgccgggtggacctaaggttcctttccactccctgagtaattcatggcatttgggggctcaccccacctccaggtctgtcaagtggcctttgtccc

SEQ ID NO: 177 - DNA, 1004 bp, Homo sapiens
ctactgagggacagcgacagcatgaaggctccgggtcggctcgtgctcatcatcctgtgctccgtggtcttctctgccgtctacatcctcctgtgctgctgggccggcctgcccctctgcctggccacctgcctggaccaccacttccccacaggctccaggcccactgtgccgggacccctgcacttcagtggatatagcagtgtgccagatgggaagccgctggtccgcgagccctgccgcagctgtgccgtggtgtccagctccggccaaatgctgggctcaggcctgggtgctgagatcgacagtgccgagtgcgtgttccgcatgaaccaggcgcccaccgtgggctttgaggcggatgtgggccagcgcagcaccctgcgtgtcgtctcacacacaagcgtgccgctgctgctgcgcaactattcacactacttccagaaggcccgagacacgctctacatggtgtggggccagggcaggcacatggaccgggtgctcggcggccgcacctaccgcacgctgctgcagctcaccaggatgtaccccggcctgcaggtgtacaccttcacggagcgcatgatggcctactgcgaccagatcttccaggacgagacgggcaagaaccggaggcagtcgggctccttcctcagcaccggctggttcaccatgatcctcgcgctggagctgtgtgaggagatcgtggtctatgggatggtcagcgacagctactgcagggagaagagccacccctcagtgccttaccactactttgagaagggccggctagatgagtgtcagatgtacctggcacacgagcaggcgccccgaagcgcccaccgcttcatcactgagaaggcggtcttctcccgctgggccaagaagaggcccatcgtgttcgcccatccgtcctggaggactgagtagcttccgtcgtcctgccagccgccatgccgttgcgaggcctccgggatgtcccatcccaagccatcacactccac

SEQ ID NO: 178 - DNA, 2959 bp, Homo sapiens
  misc_feature (2030)..(2031): n is a, c, g, or t
ggttgagtacatgaggctgggtgaaaacatcattgaatattccagggattttaagttatacatcacaacccgtttgaggaatccacattacctcccagaagttgccgtgaaggtctgtctcctcaacttcatgatcacccccttgggtctccaagatcaactccttggcatcgtggctgcgaaggagaagccagagctggaagagaaaaagaaccagttgattgtggaaagtgccaagaacaagaagcatctcaaggaaattgaagataagatcttggaggttctctccatgtccaagggtaacatcctggaggatgaaaccgccatcaaagttctgtcctcctccaaagtgctatctgaagagatctcagagaaacagaaagttgcttccatgacagaaacgcagattgacgagactcggatgggctacaagccagtggctgtgcattctgccaccatcttcttttgtatctcggacctggccaacatcgagccgatgtaccagtactccctgacttggttcataaatctctacatgcattccttgacccacagcacgaagagcgaggaactgaatctgcgcatcaagtacatcattgaccatttcaccctgagcatctacaacaacgtgtgccgttctctgtttgagaaggacaagctactcttctctctcctcctgaccatcggcatcatgaaacagaagaaggaaattacggaggaggtgtggtacttccttctcactggaggcatcgcactggataacccctaccccaatccagctccccaatggctgtctgagaaggcatgggcagagattgtccgtgcatctgccttacccaaactgcatggcctgatggagcatttggaacagaacctgggtgaatggaagctgatctatgactcggcctggccccatgaggagcaactccctgggtcttggaagttctctcaaggattggagaagatggtgatccttcgatgtttgcggcctgacaaaatggtgccagcggtccgggagttcattgctgaacatatgggaaagctgtatatcgaagcccctacgttcgatctccagggatcctacaatgattccagctgctgtgcgcctttgatttttgtgttgtctccaagtgcagacccaatggcaggcctgctgaagtttgctgatgatcttggtatgggaggtaccagaacacagaccatctcccttggccaaggccaaggccctattgctgccaaaatgatcaacaatgccatcaaagacgggacctgggtggtcttacagaactgccacctggccgcaagctggatgcctaccctggagaagatttgtgaggaggtgattgttcctgagagcaccaatgccagattcagactctggctaaccagctatccatcagagaagtttccagtcagcattctccagaatggaatcaaaatgaccaatgagccccccaaagggctccgggccaacctgttgcgctcctacctcaatgaccccatctcagatcctgtgttcttccaaagctgtgcaaaggcggtgatgtggcaaaagatgttatttggcctttgtttcttccacgccgttgttcaagagagaagaaacttcggccccctagggtggaatattccctatgaattcaacgaatctgacctgaggattagtatgtggcagatccagatgtttctcaatgactacaaggaggtgccctttgatgctctgacctacctgacaggggaatgtaattacggaggcagagtgactgatgacaaagaccggcgtctcctgctgtcacttctgtccatgttctactgtaaggaaattgaggaggactattactccctcgctcctggagacacttactacatccctcctcatggctcctaccagtcctatatcgactatctcaggaatctccccatcacagcccacccagaagtgttcggcctccatgagaacgcagacatcaccaaagacaaccaggaaaccaaccagctgtttgagggggtcctgctgaccctccctaganngtcaggaggaagtggcaagtcccctcaggaagtggttgaggagttggcacaagacattctctccaagcttcccagagactttgacctggaagaggtcatgaagttgtaccccgtggtctatgaagaatccatgaataccgtcctaaggcaggagctcatcagattcaacaggctgaccaaagtggttcggaggagcctcatcaatcttggccgagccatcaaaggacaggtcctgatgtcctcggagctagaggaagtctttaacagcatgcttgtgggtaaagtgccagccatgtgggcagccaagtcttacccatcactgaagcctctggggggctacgtggctgacctgctggcccgcctgaccttcttccaggaatggattgacaaggggccccctgtggtattttggatctctggattctacttcacacagtcttttttgactggcgtctctcaaaattatgcccggaaatataccatccccattgaccacattggatttgagtttgaggtaaccccacaagaaacagtgatggagaataaccccgaagatggggcctacatcaaagggctcttcttagaaggtgcccgttgggacaggaaaacgatgcagattggggaatctctccccaaaatcctctatgacccactgcccatcatttggctgaaacctggggagagcgcaatgtttctgcatcaggacatctatgtgtgtccagtctacaaaacaagtgcccgcagaggaaccctctccaccacaggccactctaccaactatgtcctctccattgagcttccaacagacatgccccagaagcactggataaaccgaggggtggcctcactgtgccagctggataactgatggcatttgtctcaagacagaaaataaaaagcatttcattcttaaaaaaaaaaaaaaaaa

SEQ ID NO: 179 - DNA, 952 bp, Homo sapiens
gcagctgcgctgcgactgctctggaaggagaggacggggcacaaaccctgaccatgaccccccacaggctgctgccaccgctgctgctgctgctagctctgctgctcgctgccagcccaggaggcgccttggcgcggtgcccaggctgcgggcaaggggtgcaggcgggttgtccagggggctgcgtggaggaggaggatggggggtcgccagccgagggctgcgcggaagctgagggctgtctcaggagggaggggcaggagtgcggggtctacacccctaactgcgccccaggactgcagtgccatccgcccaaggacgacgaggcgcctttgcgggcgctgctgctcggccgaggccgctgccttccggcccgcgcgcctgctgttgcagaggagaatcctaaggagagtaaaccccaagcaggcactgcccgcccacaggatgtgaaccgcagagaccaacagaggaatccaggcacctctaccacgccctcccagcccaattctgcgggtgtccaagacactgagatgggcccatgccgtagacatctggactcagtgctgcagcaactccagactgaggtctaccgaggggctcaaacactctacgtgcccaattgtgaccatcgaggcttctaccggaagcggcagtgccgctcctcccaggggcagcgccgaggtccctgctggtgtgtggatcggatgggcaagtccctgccagggtctccagatggcaatggaagctcctcctgccccactgggagtagcggctaaagctgggggatagaggggctgcagggccactggaaggaacatggagctgtcatcactcaacaaaaaaccgaggccctcaatccaccttcaggccccgccccatgggcccctcaccgctggttggaaagagtgttggtgttggctggggtgtcaataaagctgtgcttggggtcaaa

SEQ ID NO: 180 - DNA, 1029 bp, Homo sapiens
tctgcttttaataagcttcccaatcagctctcgagtgcaaagcgctctccctccctcgcccagccttcgtcctcctggcccgctcctctcatccctcccattctccatttcccttccgttccctccctgtcagggcgtaattgagtcaaaggcaggatcaggttccccgccttccagtccaaaaatcccgccaagagagccccagagcagaggaaaatccaaagtggagagaggggaagaaagagaccagtgagtcatccgtccagaaggcggggagagcagcagcggcccaagcaggagctgcagcgagccgggtacctggactcagcggtagcaacctcgccccttgcaacaaaggcagactgagcgccagagaggacgtttccaactcaaaaatgcaggctcaacagtaccagcagcagcgtcgaaaatttgcagctgccttcttggcattcattttcatactggcagctgtggatactgctgaagcagggaagaaagagaaaccagaaaaaaaagtgaagaagtctgactgtggagaatggcagtggagtgtgtgtgtgcccaccagtggagactgtgggctgggcacacgggagggcactcggactggagctgagtgcaagcaaaccatgaagacccagagatgtaagatcccctgcaactggaagaagcaatttggcgcggagtgcaaataccagttccaggcctggggagaatgtgacctgaacacagccctgaagaccagaactggaagtctgaagcgagccctgcacaatgccgaatgccagaagactgtcaccatctccaagccctgtggcaaactgaccaagcccaaacctcaagcagaatctaagaagaagaaaaaggaaggcaagaaacaggagaagatgctggattaaaagatgtcacctgtggaacataaaaaggacatcagcaaacaggatcagttaactattgcatttatatgtaccgtaggctttgtattcaaaaattatctatagctaagtacacaataagcaaaaacaa

SEQ ID NO: 181 - DNA, 1300 bp, Homo sapiens
ctctccctccctcgcccagccttcgtcctcctggcccgctcctctcatccctcccattctccatttcccttccgttccctccctgtcagggcgtaattgagtcaaaggcaggatcaggttccccgccttccagtccaaaaatcccgccaagagagccccagagcagaggaaaatccaaagtggagagaggggaagaaagagaccagtgagtcatccgtccagaaggcggggagagcagcagcggcccaagcaggagctgcagcgagccgggtacctggactcagcggtagcaacctcgccccttgcaacaaaggcagactgagcgccagagaggacgtttccaactcaaaaatgcaggctcaacagtaccagcagcagcgtcgaaaatttgcagctgccttcttggcattcattttcatactggcagctgtggatactgctgaagcagggaagaaagagaaaccagaaaaaaaagtgaagaagtctgactgtggagaatggcagtggagtgtgtgtgtgcccaccagtggagactgtgggctgggcacacgggagggcactcggactggagctgagtgcaagcaaaccatgaagacccagagatgtaagatcccctgcaactggaagaagcaatttggcgcggagtgcaaataccagttccaggcctggggagaatgtgacctgaacacagccctgaagaccagaactggaagtctgaagcgagccctgcacaatgccgaatgccagaagactgtcaccatctccaagccctgtggcaaactgaccaagcccaaacctcaagcagaatctaagaagaagaaaaaggaaggcaagaaacaggagaagatgctggattaaaagatgtcacctgtggaacataaaaaggacatcagcaaacaggatcagttaactattgcatttatatgtaccgtaggctttgtattcaaaaattatctatagctaagtacacaataagcaaaaacaaaaagaaaagaaaatttttgtagtagcgttttttaaatgtatactatagtaccagtaggggcttataataaaggactgtaatcttatttaggaagttgacttatagtacatgataaatgatagacaattgaggtaagttttttgaaattatgtgacattttacattaaattttttttacattttttgggcagcaatttaaatgttatgactatgtaaactacttctcttgttaggtaatttttttcacctagatttttttcccaattgagaaaaatatatactaaacaaaaaaaaaaaaaaaaaaaaaaaaaaaaa

SEQ ID NO: 182 - DNA, 759 bp, Homo sapiens
gacccgcagcagagacgacgcctgcagcaaggagaccaggaaggggtgagacaaggaagaggatgtctgagctggagaaggccatggtggccctcatcgacgttttccaccaatattctggaagggagggagacaagcacaagctgaagaaatccgaactcaaggagctcatcaacaatgagctttcccatttcttagaggaaatcaaagagcaggaggttgtggacaaagtcatggaaacactggacaatgatggagacggcgaatgtgacttccaggaattcatggcctttgttgccatggttactactgcctgccacgagttctttgaacatgagtgagattagaaagcagccaaacctttcctgtaacagagacggtcatgcaagaaagcagacagcaagggcttgcagcctagtaggagctgagctttccagccgtgttgtagctaattaggaagcttgatttgctttgtgattgaaaaattgaaaacctctttccaaaggctgttttaacggcctgcatcattctttctgctatattaggcctgtgtgtaagctgactggccccagggactcttgttaacagtaacttaggagtcaggtctcagtgataaagcgtgcaccgtgcagcccgccatggccgtgtagaccctaacccggagggaaccctgactacagaaattaccccggggcacccttaaaacttccactacctttaaaaaacaaagccttatccagcaaaaaaaaaaaaaaaaaa

SEQ ID NO: 183 - DNA, 1308 bp, Homo sapiens
tccgcaaatatgcagaattaccggccgggtcgctcctgaagccagcgcggggaggcagcgcggcggcggccagcaccgggaacgcaccgaggaagaagcccagcccccgccctccgccccttccgtccccacccccatcccggcggcccaggaggctccccgcgctggcgcgcactccctgtttctcctcctcctggctggcgctgcctgcctctccgcactcactgctcgccgggcgccgtccgccagctccgtgctccccgcgccaccctcctccgggccgcgctccctaagggatggtactgattttcgccgccacaggagaccggctggagcgccgccccgcggcctcgcctctcctccgagcagccagcgcctcgggacgcgatgaggaccttggcttgcctgctgctcctcggctgcggatacctcgcccatgttctggccgaggaagccgagatcccccgcgaggtgatcgagaggctggcccgcagtcagatccacagcatccgggacctccagcgactcctggagatagactccgtagggagtgaggattctttggacaccagcctgagagctcacggggtccatgccactaagcatgtgcccgagaagcggcccctgcccattcggaggaagagaagcatcgaggaagctgtccccgctgtctgcaagaccaggacggtcatttacgagattcctcggagtcaggtcgaccccacgtccgccaacttcctgatctggcccccgtgcgtggaggtgaaacgctgcaccggctgctgcaacacgagcagtgtcaagtgccagccctcccgcgtccaccaccgcagcgtcaaggtggccaaggtggaatacgtcaggaagaagccaaaattaaaagaagtccaggtgaggttagaggagcatttggagtgcgcctgcgcgaccacaagcctgaatccggattatcgggaagaggacacgggaaggcctagggagtcaggtaaaaaacggaaaagaaaaaggttaaaacccacctaaagcagccaaccagatgtgaggtgaggatgagccgcagccctttcctgggacatggatgtacatggcgtgttacattcctgaacctactatgtacggtgctttattgccagtgtgcggtctttgttctcctccgtgaaaaactgtgtccgagaacactcgggagaacaaagagacagtgcacatttgtttaatgtgacatcaaagcaagtattgtagcactcggtgaagcagtaagaagcttccttgtcaaaaagagagagagagaaaagaaaaaaaaaggaattc

SEQ ID NO: 184 - DNA, 505 bp, Homo sapiens
aaagttctctggaggatgtggctgcagagcctgctgctcttgggcactgtggcctgcagcatctctgcacccgcccgctcgcccagccccagcacacagccctgggagcatgtgaatgccatccaggaggcccggcgtctcctgaacctgagtagagacactgctgctgagatgaatgaaacagtagaagtcatctcagaaatgtttgacctccaggagccgacctgcctacagacccgcctggagctgtacaagcagggcctgcggggcagcctcaccaagctcaagggccccttgaccatgatggccagccactacaaacagcactgccctccaaccccggaaacttcctgtgcaacccagattatcacctttgaaagtttcaaagagaacctgaaggactttctgcttgtcatcccctttgactgctgggagccagtccaggagtgagaccggccagatgaggctggccaagccggggagctgctctctcatgaaacaagag

SEQ ID NO: 185 - DNA, 1833 bp, Homo sapiens
ggcacgaggggagaataaaataatcaggaggctgggtttgtgcttggctccaagcatgccctgctctctgacctggagactaccacctcgcacatgccaaggtcaggggctcccaaagagcgccctgcggagcctctcacccctcccccatcctatggccaccagccacagacagggtctggggagtcttcaggagcctcgggggacaaggaccacctgtacagcacggtatgcaagcctcggtccccaaagcctgcagccccggcggcccctccattctcctcttccagcggtgtcttgggtaccgggctctgtgagctagatcggttgcttcaggaacttaatgccactcagttcaacatcacagatgaaatcatgtctcagttcccatctagcaaggtggcttcaggagagcagaaggaggaccagtctgaagataagaaaagacccagcctcccttccagcccgtctcctggcctcccaaaggcttctgccacctcagccactctggagctggatagactgatggcctcactctctgacttccgcgttcaaaaccatcttccagcctctgggccaactcagccaccggtggtgagctccacaaatgagggctccccatccccaccagagccgactggcaagggcagcctagacaccatgctggggctgctgcagtccgacctcagccgccggggtgttcccacccaggccaaaggcctctgtggctcctgcaataaacctattgctgggcaagtggtgacggctctgggccgcgcctggcaccccgagcacttcgtttgcggaggctgttccaccgccctgggaggcagcagcttcttcgagaaggatggagcccccttctgccccgagtgctactttgagcgcttctcgccaagatgtggcttctgcaaccagcccatccgacacaagatggtgaccgccttgggcactcactggcacccagagcatttctgctgcgtcagttgcggggagcccttcggagatgagggtttccacgagcgcgagggccgcccctactgccgccgggacttcctgcagctgttcgccccgcgctgccagggctgccagggccccatcctggataactacatctcggcgctcagcgcgctctggcacccggactgtttcgtctgcagggaatgcttcgcgcccttctcgggaggcagctttttcgagcacgagggccgcccgttgtgcgagaaccacttccacgcacgacgcggctcgctgtgcgccacgtgtggcctccctgtgaccggccgctgcgtgtcggccctgggtcgccgcttccacccggaccacttcacatgcaccttctgcctgcgcccgctcaccaaggggtccttccaggagcgcgccggcaagccctactgccagccctgcttcctgaagctcttcggctgacagcccgctcggctcgccctctcccccggaggccgcgccctcccggaaaagccgggtcctccagaccccgaggccttgctctcagagcgggaggccccacccactggagagccccgcccctaaggtactatgagttctcaggggtcaagttcagaaacggcccagccagacctaaacccacacgcccacaaagtggattgcacacagacaagaactcccgtgcgggcctccactctattcccacccttgagggagcccccttactgggggagggtccttgcaattccagcgaatcggaggccaggccaggacgtccttgctccctgcaccctcactgttctgtgcactttttctacctacataaacacacgcattccacctctaaaaaaaaaaaaaaaaaaaaaa

SEQ ID NO: 186 - DNA, 2858 bp, Homo sapiens
catgaggagctgagcgtctcgggcgaggcgggctgacggcagcaccatgcaggcggcagtggctgtgtccgtgcccttcttgctgctctgtgtcctggggacctgccctccggcgcgctgcggccaggcaggagacgcctcattgatggagctagagaagaggaaggaaaaccgcttcgtggagcgccagagcatcgtgccactgcgcctcatctaccgctcgggcggcgaagacgaaagtcggcacgacgcgctcgacacgcgggtgcggggcgacctcggtggcccgcagttgactcatgttgaccaagcaagcttccaggttgatgcctttggaacgtcattcattctcgatgtcgtgctaaatcatgatttgctgtcctctgaatacatagagagacacattgaacatggaggcaagactgtggaagttaaaggaggagagcactgttactaccagggccatatccgaggaaaccctgactcatttgttgcattgtcaacatgccacggacttcatgggatgttctatgacgggaaccacacatatctcattgagccagaagaaaatgacactactcaagaggatttccattttcattcagtttacaaatccagactgtttgaattttccttggatgatcttccatctgaatttcagcaagtaaacattactccatcaaaatttattttgaagccaagaccaaaaaggagtaaacggcagcttcgtcgatatcctcgtaatgtagaagaagaaaccaaatacattgaactgatgattgtgaatgatcaccttatgtttaaaaaacatcggctttccgttgtacataccaatacctatgcgaaatctgtggtgaacatggcagatttaatatataaagaccaacttaagaccaggatagtattggttgctatggaaacctgggcgactgacaacaagtttgccatatctgaaaatccattgatcaccctacgtgagtttatgaaatacaggagggattttatcaaagagaaaagtgatgcagttcaccttttttcgggaagtcaatttgagagtagccggagcggggcagcttatattggtgggatttgctcgttgctgaaaggaggaggcgtgaatgaatttgggaaaactgatttaatggctgttacacttgcccagtcattagcccataatattggtattatctcagacaaaagaaagttagcaagtggtgaatgtaaatgcgaggacacgtggtccgggtgcataatgggagacactggctattatcttcctaaaaagttcacccagtgtaatattgaagagtatcatgacttcctgaatagtggaggtggtgcctgccttttcaacaaaccttctaagcttcttgatcctcctgagtgtggcaatggcttcattgaaactggagaggagtgtgattgtggaaccccggccgaatgtgtccttgaaggagcagagtgttgtaagaaatgcaccttgactcaagactctcaatgcagtgacggtctttgctgtaaaaagtgcaagtttcagcctatgggcactgtgtgccgagaagcagtaaatgattgtgatattcgtgaaacgtgctcaggaaattcaagccagtgtgcccctaatattcataaaatggatggatattcatgtgatggtgttcagggaatttgctttggaggaagatgcaaaaccagagatagacaatgcaaatacatttgggggcaaaaggtgacagcatcagacaaatattgctatgagaaactgaatattgaagggacggagaagggtaactgtgggaaagacaaagacacatggatacagtgcaacaaacgggatgtgctttgtggttaccttttgtgtaccaatattggcaatatcccaaggcttggagaactcgatggtgaaatcacatctactttagttgtgcagcaaggaagaacattaaactgcagtggtgggcatgttaagcttgaagaagatgtagatcttggctatgtggaagatgggacaccttgtggtccccaaatgatgtgcttagaacacaggtgtcttcctgtggcttctttcaactttagtacttgcttgagcagtaaagaaggcactatttgctcaggaaatggagtttgcagtaatgagctgaagtgtgtgtgtaacagacactggataggttctgattgcaacacttacttccctcacaatgatgatgcaaagactggtatcactctgtctggcaatggtgttgctggcaccaatatcataataggcataattgctggcaccattttagtgctggccctcatattaggaataactgcgtggggttataaaaactatcgagaacagagacagttaccccagggagattatgtaaaaaagcctggagatggtgactctttttatagcgacattcctcccggagtcagcacaaactcagcatctagttctaagaagaggtcaaatgggctctctcattcttggagtgaaaggattccagacacaaaacatatttcagacatctgtgaaaatgggcgacctcgaagtaactcttggcaaggtaacctgggaggcaacaaaaagaaaatcagaggcaaaagatttagacctcggtctaattcaactgagactttatctcctgccaagtctccttcttcatcaactgggtctattgcctccagcagaaaatacccttacccaatgcctccacttcctgatgaggacaagaaagtgaaccgacaaagtgccaggctatgggagacatccatttaagatcaactgtttacatgtgatacatcgaaaactgtttacttcaacttttatagaaacccaggctcatggaatcactgcaaatctatctgct

SEQ ID NO: 187 - DNA, 2786 bp, Homo sapiens
agcgggttccgggaggcgcccggtgagcccacgtctgttgcggcggagcgagggaaacggactcggcggcgccggcatgaggagctgagcgtctcgggcgaggcgggctgacggcagcaccatgcaggcggcagtggctgtgtccgtgcccttcttgctgctctgtgtcctggggacctgccctccggcgcgctgcggccaggcaggagacgcctcattgatggagctagagaagaggaaggaaaaccgcttcgtggagcgccagagcatcgtgccactgcgcctcatctaccgctcgggcggcgaagacgaaagtcggcacgacgcgctcgacacgcgggtgcggggcgacctcggtggcccgcagttgactcatgttgaccaagcaagcttccaggttgatgcctttggaacgtcattcattctcgatgtcgtgctaaatcatgatttgctgtcctctgaatacatagagagacacattgaacatggaggcaagactgtggaagttaaaggaggagagcactgttactaccagggccatatccgaggaaaccctgactcatttgttgcattgtcaacatgccacggacttcatgggatgttctatgacgggaaccacacatatctcattgagccagaagaaaatgacactactcaagaggatttccattttcattcagtttacaaatccagactgtttgaattttccttggatgatcttccatctgaatttcagcaagtaaacattactccatcaaaatttattttgaagccaagaccaaaaaggagtaaacggcagcttcgtcgatatcctcgtaatgtagaagaagaaaccaaatacattgaactgatgattgtgaatgatcaccttatgtttaaaaaacatcggctttccgttgtacataccaatacctatgcgaaatctgtggtgaacatggcagatttaatatataaagaccaacttaagaccaggatagtattggttgctatggaaacctgggcgactgacaacaagtttgccatatctgaaaatccattgatcaccctacgtgagtttatgaaatacaggagggattttatcaaagagaaaagtgatgcagttcaccttttttcgggaagtcaatttgagagtagccggagcggggcagcttatattggtgggatttgctcgttgctgaaaggaggaggcgtgaatgaatttgggaaaactgatttaatggctgttacacttgcccagtcattagcccataatattggtattatctcagacaaaagaaagttagcaagtggtgaatgtaaatgcgaggacacgtggtccgggtgcataatgggagacactggctattatcttcctaaaaagttcacccagtgtaatattgaagagtatcatgacttcctgaatagtggaggtggtgcctgccttttcaacaaaccttctaagcttcttgatcctcctgagtgtggcaatggcttcattgaaactggagaggagtgtgattgtggaaccccggccgaatgtgtccttgaaggagcagagtgttgtaagaaatgcaccttgactcaagactctcaatgcagtgacggtctttgctgtaaaaagtgcaagtttcagcctatgggcactgtgtgccgagaagcagtaaatgattgtgatattcgtgaaacgtgctcaggaaattcaagccagtgtgcccctaatattcataaaatggatggatattcatgtgatggtgttcagggaatttgctttggaggaagatgcaaaaccagagatagacaatgcaaatacatttgggggcaaaaggtgacagcatcagacaaatattgctatgagaaactgaatattgaagggacggagaagggtaactgtgggaaagacaaagacacatggatacagtgcaacaaacgggatgtgctttgtggttaccttttgtgtaccaatattggcaatatcccaaggcttggagaactcgatggtgaaatcacatctactttagttgtgcagcaaggaagaacattaaactgcagtggtgggcatgttaagcttgaagaagatgtagatcttggctatgtggaagatgggacaccttgtggtccccaaatgatgtgcttagaacacaggtgtcttcctgtggcttctttcaactttagtacttgcttgagcagtaaagaaggcactatttgctcaggaaatggagtttgcagtaatgagctgaagtgtgtgtgtaacagacactggataggttctgattgcaacacttacttccctcacaatgatgatgcaaagactggtatcactctgtctggcaatggtgttgctggcaccaatatcataataggcataattgctggcaccattttagtgctggccctcatattaggaataactgcgtggggttataaaaactatcgagaacagagacagttaccccagggagattatgtaaaaaagcctggagatggtgactctttttatagcgacattcctcccggagtcagcacaaactcagcatctagttctaagaagaggtcaaatgggctctctcattcttggagtgaaaggattccagacacaaaacatatttcagacatctgtgaaaatgggcgacctcgaagtaactcttggcaaggtaacctgggaggcaacaaaaagaaaatcagaggcaaaagatttagacctcggtctaattcaactgagtaagtctgaacctctaatggaaaaaggcactccaaggtcctgtgcaaatagtgtcaaaagtaaattaagcagatagtcaaagaactgt

SEQ ID NO: 188 - DNA, 2678 bp, Homo sapiens
agcgggttccgggaggcgcccggtgagcccacgtctgttgcggcggagcgagggaaacggactcggcggcgccggcatgaggagctgagcgtctcgggcgaggcgggctgacggcagcaccatgcaggcggcagtggctgtgtccgtgcccttcttgctgctctgtgtcctggggacctgccctccggcgcgctgcggccaggcaggagacgcctcattgatggagctagagaagaggaaggaaaaccgcttcgtggagcgccagagcatcgtgccactgcgcctcatctaccgctcgggcggcgaagacgaaagtcggcacgacgcgctcgacacgcgggtgcggggcgacctcggtggcccgcagttgactcatgttgaccaagcaagcttccaggttgatgcctttggaacgtcattcattctcgatgtcgtgctaaatcatgatttgctgtcctctgaatacatagagagacacattgaacatggaggcaagactgtggaagttaaaggaggagagcactgttactaccagggccatatccgaggaaaccctgactcatttgttgcattgtcaacatgccacggacttcatgggatgttctatgacgggaaccacacatatctcattgagccagaagaaaatgacactactcaagaggatttccattttcattcagtttacaaatccagactgtttgaattttccttggatgatcttccatctgaatttcagcaagtaaacattactccatcaaaatttattttgaagccaagaccaaaaaggagtaaacggcagcttcgtcgatatcctcgtaatgtagaagaagaaaccaaatacattgaactgatgattgtgaatgatcaccttatgtttaaaaaacatcggctttccgttgtacataccaatacctatgcgaaatctgtggtgaacatggcagatttaatatataaagaccaacttaagaccaggatagtattggttgctatggaaacctgggcgactgacaacaagtttgccatatctgaaaatccattgatcaccctacgtgagtttatgaaatacaggagggattttatcaaagagaaaagtgatgcagttcaccttttttcgggaagtcaatttgagagtagccggagcggggcagcttatattggtgggatttgctcgttgctgaaaggaggaggcgtgaatgaatttgggaaaactgatttaatggctgttacacttgcccagtcattagcccataatattggtattatctcagacaaaagaaagttagcaagtggtgaatgtaaatgcgaggacacgtggtccgggtgcataatgggagacactggctattatcttcctaaaaagttcacccagtgtaatattgaagagtatcatgacttcctgaatagtggaggtggtgcctgccttttcaacaaaccttctaagcttcttgatcctcctgagtgtggcaatggcttcattgaaactggagaggagtgtgattgtggaaccccggccgaatgtgtccttgaaggagcagagtgttgtaagaaatgcaccttgactcaagactctcaatgcagtgacggtctttgctgtaaaaagtgcaagtttcagcctatgggcactgtgtgccgagaagcagtaaatgattgtgatattcgtgaaacgtgctcaggaaattcaagccagtgtgcccctaatattcataaaatggatggatattcatgtgatggtgttcagggaatttgctttggaggaagatgcaaaaccagagatagacaatgcaaatacatttgggggcaaaaggtgacagcatcagacaaatattgctatgagaaactgaatattgaagggacggagaagggtaactgtgggaaagacaaagacacatggatacagtgcaacaaacgggatgtgctttgtggttaccttttgtgtaccaatattggcaatatcccaaggcttggagaactcgatggtgaaatcacatctactttagttgtgcagcaaggaagaacattaaactgcagtggtgggcatgttaagcttgaagaagatgtagatcttggctatgtggaagatgggacaccttgtggtccccaaatgatgtgcttagaacacaggtgtcttcctgtggcttctttcaactttagtacttgcttgagcagtaaagaaggcactatttgctcaggaaatggagtttgcagtaatgagctgaagtgtgtgtgtaacagacactggataggttctgattgcaacacttacttccctcacaatgatgatgcaaagactggtatcactctgtctggcaatggtgttgctggcaccaatatcataataggcataattgctggcaccattttagtgctggccctcatattaggaataactgcgtggggttataaaaactatcgagaacagaggtcaaatgggctctctcattcttggagtgaaaggattccagacacaaaacatatttcagacatctgtgaaaatgggcgacctcgaagtaactcttggcaaggtaacctgggaggcaacaaaaagaaaatcagaggcaaaagatttagacctcggtctaattcaactgagtaagtctgaacctctaatggaaaaaggcactccaaggtcctgtgcaaatagtgtcaaaagtaaattaagcagatagtcaaagaactgt

SEQ ID NO: 189 - DNA, 2796 bp, Homo sapiens
catgaggagctgagcgtctcgggcgaggcgggctgacggcagcaccatgcaggcggcagtggctgtgtccgtgcccttcttgctgctctgtgtcctggggacctgccctccggcgcgctgcggccaggcaggagacgcctcattgatggagctagagaagaggaaggaaaaccgcttcgtggagcgccagagcatcgtgccactgcgcctcatctaccgctcgggcggcgaagacgaaagtcggcacgacgcgctcgacacgcgggtgcggggcgacctcggtggcccgcagttgactcatgttgaccaagcaagcttccaggttgatgcctttggaacgtcattcattctcgatgtcgtgctaaatcatgatttgctgtcctctgaatacatagagagacacattgaacatggaggcaagactgtggaagttaaaggaggagagcactgttactaccagggccatatccgaggaaaccctgactcatttgttgcattgtcaacatgccacggacttcatgggatgttctatgacgggaaccacacatatctcattgagccagaagaaaatgacactactcaagaggatttccattttcattcagtttacaaatccagactgtttgaattttccttggatgatcttccatctgaatttcagcaagtaaacattactccatcaaaatttattttgaagccaagaccaaaaaggagtaaacggcagcttcgtcgatatcctcgtaatgtagaagaagaaaccaaatacattgaactgatgattgtgaatgatcaccttatgtttaaaaaacatcggctttccgttgtacataccaatacctatgcgaaatctgtggtgaacatggcagatttaatatataaagaccaacttaagaccaggatagtattggttgctatggaaacctgggcgactgacaacaagtttgccatatctgaaaatccattgatcaccctacgtgagtttatgaaatacaggagggattttatcaaagagaaaagtgatgcagttcaccttttttcgggaagtcaatttgagagtagccggagcggggcagcttatattggtgggatttgctcgttgctgaaaggaggaggcgtgaatgaatttgggaaaactgatttaatggctgttacacttgcccagtcattagcccataatattggtattatctcagacaaaagaaagttagcaagtggtgaatgtaaatgcgaggacacgtggtccgggtgcataatgggagacactggctattatcttcctaaaaagttcacccagtgtaatattgaagagtatcatgacttcctgaatagtggaggtggtgcctgccttttcaacaaaccttctaagcttcttgatcctcctgagtgtggcaatggcttcattgaaactggagaggagtgtgattgtggaaccccggccgaatgtgtccttgaaggagcagagtgttgtaagaaatgcaccttgactcaagactctcaatgcagtgacggtctttgctgtaaaaagtgcaagtttcagcctatgggcactgtgtgccgagaagcagtaaatgattgtgatattcgtgaaacgtgctcaggaaattcaagccagtgtgcccctaatattcataaaatggatggatattcatgtgatggtgttcagggaatttgctttggaggaagatgcaaaaccagagatagacaatgcaaatacatttgggggcaaaaggtgacagcatcagacaaatattgctatgagaaactgaatattgaagggacggagaagggtaactgtgggaaagacaaagacacatggatacagtgcaacaaacgggatgtgctttgtggttaccttttgtgtaccaatattggcaatatcccaaggcttggagaactcgatggtgaaatcacatctactttagttgtgcagcaaggaagaacattaaactgcagtggtgggcatgttaagcttgaagaagatgtagatcttggctatgtggaagatgggacaccttgtggtccccaaatgatgtgcttagaacacaggtgtcttcctgtggcttctttcaactttagtacttgcttgagcagtaaagaaggcactatttgctcaggaaatggagtttgcagtaatgagctgaagtgtgtgtgtaacagacactggataggttctgattgcaacacttacttccctcacaatgatgatgcaaagactggtatcactctgtctggcaatggtgttgctggcaccaatatcataataggcataattgctggcaccattttagtgctggccctcatattaggaataactgcgtggggttataaaaactatcgagaacagaggtcaaatgggctctctcattcttggagtgaaaggattccagacacaaaacatatttcagacatctgtgaaaatgggcgacctcgaagtaactcttggcaaggtaacctgggaggcaacaaaaagaaaatcagaggcaaaagatttagacctcggtctaattcaactgagtatttaaacccatggttcaaaagagactataatgtagctaagtgggtagaagatgtgaataaaaacactgaagaaccatactttaggactttatctcctgccaagtctccttcttcatcaactgggtctattgcctccagcagaaaatacccttacccaatgcctccacttcctgatgaggacaagaaagtgaaccgacaaagtgccaggctatgggagacatccatttaagatcaactgtttacatgtgatacatcgaaaactgtttacttcaactttta

SEQ ID NO: 190 - DNA, 5236 bp, Homo sapiens
  misc_feature (17)..(17): n is a, c, g, or t
  misc_feature (5094)..(5097): n is a, c, g, or t
atggagcggtgcagccntggccatcgcctcctcctcctcctacctctggtgctggggctgagcgcggccccaggctgggcaggtgcaccccctgtggatgtgctccgggccctgaggttcccctccctccctgatggtgtccggagagcgaaaggcatctgtccagctgatgtggcctaccgagtggcacgacctgcccagctcagtgcacccactcgccagcttttcccaggaggatttcccaaagatttctctctgctgactgttgtccggacccgccctggtctccaagctcccctcctgactctctacagtgcccagggtgtccgacagctgggcctggagctgggccgacctgtccgcttcctgtatgaagaccagacagggcggcctcaacctccctctcagccagtcttccgaggcctcagcctagcagatggcaagtggcaccgtgtggctgtggctgtgaagggccagtctgtcaccctcattgttgactgcaagaagcgagtcacccggcctctcccccgaagtgctcgtccagtattggacacccatggagtgatcatctttggtgcccgtattctggatgaagaagtctttgagggtgatgtccaggagctggccattgtcccaggggtccaggcagcctatgaatcatgtgaacagaaggagctggaatgcgaggggggccagagggaaagaccccaaaaccaacagcctcacagagcccagagatctccacagcagcaaccatcaagacttcacaggccacaaaatcaggaaccccagagccaggaccccaccccaggtgaagaggaagaaatcctggagtcgagcctcttgccaccccttgaggaggctgcccatggaccccgagggctgaagggagagaaaggagagcctgcagtgttggaacctggtatgctcgtggaggggccccctggcccagaagggcctgcgggattgattggtccccctggcatccaggggaacccaggcccagttggagaccctggagagaggggcccccctggccgagcagggctccctggatcagatggggctcctggtcctcctggcacatctctcatgctcccattccggtttggcagtggtgggggtgacaagggccctgtggtggcggcccaggaggctcaggcccaggcgatcctgcagcaggcgaggctggcgctccgtggaccccctggccccatgggatacacagggcgccctggacccttgggccaacctgggagccctggcctgaaaggagagtctggagacttaggacctcagggccccagaggacctcagggcctcacaggctccctgggcaaggctgggcgaaggggccgggcaggtgctgatggagcccgagggatgcctggagatcctggagtgaagggtgaccgaggttttgatggactcccagggctccctggagagaagggccataggggtgatactggtgcccagggccttcctggtccccctggtgaggatggagagaggggagatgacggggagattgggcctcgagggctgcctggagagtcgggacctcgaggtctccttggccccaaaggcccacctggtattcctggaccccctggcgtccgaggcatggatggtccccagggccccaaagggagcttgggaccccagggagagccaggacctcctggacaacagggcacccctgggacccagggtcttcccgggccccagggtgccatcggccctcatggagagaagggtcctcaagggaagccagggctccccggcatgcctggctcagacggacccccgggtcacccagggaaggaaggtccccctggaaccaaaggaaaccagggtccctctggacctcagggtcctctaggatacccaggacctcgaggggtcaagggtgtggacggaattcggggtctgaagggtcataagggtgagaagggtgaggatggctttcctgggttcaaaggtgacataggcgtgaaaggtgacaggggcgaagttggagtccctggttccaggggagaggatggtcctgaggggccaaagggacgcactggaccgactggagaccctgggcccccagggctcatgggcgagaagggcaagctgggtgttcctggtctgcctggctatcctggacgtcagggacccaaggggtccctaggatttcctggctttcctggtgccagtggagagaagggagcccggggcctgtcggggaagtcagggcctcggggagaacggggccccacgggtccacggggtcagcggggaccccgaggtgccactgggaagtctggagctaagggaacatctggtggtgatggcccccatggcccccctggagagaggggcctccctggacctcagggtcccaacgggtttcctggaccgaaaggacccctgggcccccctgggaaggacgggctgccgggacacccaggccaaagaggagaagtgggtttccaagggaagaccggcccccctggtcctccaggagtggtgggacctcagggagcagcaggagaaaccggccctatgggggagagaggtcacccaggccccccggggccccctggagagcagggactacctgggacagctggaaaagaaggaacaaagggtgaccctggtccccctggggccccagggaaggatggtcctgctggtctgaggggattcccaggagagagaggcctcccaggcactgctggtggacctggtttgaaggggaatgaaggtccgtctggcccccctggccctgcaggctcccctggggaacgaggtgcagcaggatcagggggacccattggtcgccaggggcgcccaggcccgcagggtccccctggagcagcaggagagaaaggtgtcccaggtgagaagggccccattggcccaactggccgagatggagtgcagggtcctgtggggcttcctggtcctgctgggcctccaggtgtggctggagaggatggagacaagggtgaggtgggggaccccggacagaagggcaccaaagggaacaagggtgaacatggccctcctggaccccctggacccattggtcctgtggggcagcctggagcagcgggagcagatggggagcccggagctcggggaccccagggacactttggagccaaaggtgatgaaggaacaagaggattcaatgggcccccaggacccattggcctacagggtttgccaggcccctctggggagaagggagaaacaggagatgtgggtcctatgggaccacctggccccccaggacctcgaggtccagctggacccaatggcgctgatggcccacaaggtcccccaggaggtgttgggaacctgggtccccctggagagaagggggaaccaggagagtcaggatctccagggatccagggcgagccaggtgtcaagggtccacgcggggaacgtggagagaaaggagagtcggggcagccaggagagccagggccaccaggcgctaaaggcccacagggcgatgatggccccaaagggaaccctggtcctgttggttttcctggtgaccctggcccccctggagaaggtggccctcggggccaggatggtgctaagggtgaccgaggcgaggatggtgagccaggacagcctggatcccctggtcccaccggggagaatggacccccagggccacttggaaagcgaggtcctgctggctcgcctggttccgaggggcgacaaggagggaagggagccaagggagatcctggcgctataggtgccccggggaagacaggcccggtgggtcctgcaggcccagcagggaaacctggccctgatggtctgagggggctcccaggctcagtgggtcagcaaggccgacctggagctacaggccaggctgggcccccaggtcctgtgggacccccagggctgcctggtctccggggcgatgctggagccaagggagagaagggccacccaggtctcattggactgattgggcccccgggtgagcagggagagaagggagatcggggacttcctgggcctcagggctcccctgggcagaagggtgagatgggtatcccaggagcatccggccccattggtcctggaggtccccccggcctccccggacctgctggccccaaaggagccaaaggagccacaggcccaggcggacccaagggagagaagggtgtgcagggccctccaggacacccgggtcccccaggcgaggtgatccagccactgcccattcagatgcccaagaagactcggcgctcggtggatggaagccgtctgatgcaggaagatgaggccataccgaccgggggagcccccggcagtcctggggggctggaggagatctttggctcactcgactccctgcgggaggagatcgagcagatgaggcggccaacagggacccaggacagccctgctcgcacctgccaggacctgaagctgtgccacccagagcttcccgatggagagtactgggtcgaccccaaccagggctgtgctcgggatgccttccgagttttctgcaacttcacagcagggggtgagacctgtgtgacgcctagggatgacgtcacgcagttctcttacgtggactcagagggctccccagtgggtgtggtccagctcaccttcctgcggctgctcagcgtctcagcccaccaggacgtctcctacccctgctctggagcagcccgtgacggtcccctgagactccgtggggccaatgaggatgagctgagcccggagactagcccctatgtcaaagaattcagagatggctgccagacacagcaaggccggacggtgctggaggtgcgaacgcctgtgctggagcagctgccagtgctggatgcctccttctcagacctgggagccccaccgaggcggggaggggtgctgctggggcctgtctgcttcatgggataggaccgtctctgtctgatcctgtccattcggtaccaggcccacctggaatcccacaacatcagctctgtgccacctcccaagagggctcctcactatctagggagccctgggccagggctggagagccctcagtcggggcannnnaggggaggggtgaagtggttgcctggacaccccacgggaggagtggcatctgggctcttggccctcccacctggagcctgttacccgttagagagctgagagcccttatttaaaactcacctcccaatcaccccaaaca

SEQ ID NO: 191 - DNA, 1460 bp, Homo sapiens
gtggcttgggagagcttaatgaaaagagaacggagaggaggtgtgggttaggaaccaagaggtagccctgggggcagcagaaggctgagaggagtaggaagatcaggagctagagggagactggagggttccgggaaaagagcagaggaaagaggaaagacacagagagacgggagagagaagaagagtgggtttgaagggcggatctcagtccctggctgctttggcatttggggaactgggactccctgtggggaggagaggaaagctggaagtcctggagggacagggtcccagaaggaggggacaggaggagctgagagaggggggcagggcgttgggcaggggtccctcggaggcctcctggggatgggggctgcagctcgtctgagcgcccctcgagcgctggtactctgggctgcactgggggcagcaggtaacatcggaccagcacctgaccccgaggactggtggagctacaaggataatctccagggaaacttcgtgccagggcctcctttctggggcctggtgaatgcagcgtggagtctgtgtgctgtggggaagcggcagagccccgtggatgtggagctgaagagggttctttatgacccctttctgcccccattaaggctcagcactggaggagagaagctccggggaaccttgtacaacaccggccgacatgtctccttcctgcctgcaccccgacctgtggtcaatgtgtctggaggtcccctcctttacagccaccgactcagtgaactgcggctgctgtttggagctcgcgacggagccggctcggaacatcagatcaaccaccagggcttctctgctgaggtgcagctcattcacttcaaccaggaactctacgggaatttcagcgctgcctcccgcggccccaatggcctggccattctcagcctctttgtcaacgtggccagtacctctaacccattcctcagtcgcctccttaaccgcgacaccatcactcgcatctcctacaagaatgatgcctactttcttcaagacctgagcctggagctcctgttccctgaatccttcggcttcatcacctatcagggctctctcagcaccccgccctgctccgagactgtcacctggatcctcattgaccgggccctcaatatcacctcccttcagatgcactccctgagactcctgagccagaatcctccatctcagatcttccagagcctcagcggtaacagccggcccctgcagcccttggcccacagggcactgaggggcaacagggacccccggcaccccgagaggcgctgccgaggccccaactaccgcctgcatgtggatggtgtcccccatggtcgctgagactccccttcgaggattgcacccgcccgtcctaagcctccccacaaggcgaggggagttacccctaaaacaaagctattaaagggacagaatacttcctgttt

SEQ ID NO: 192 - DNA, 3428 bp, Homo sapiens
  misc_feature (2995)..(2995): n is a, c, g, or t
  misc_feature (3167)..(3167): n is a, c, g, or t
  misc_feature (3195)..(3195): n is a, c, g, or t
  misc_feature (3221)..(3221): n is a, c, g, or t
  misc_feature (3246)..(3246): n is a, c, g, or t
cccgagagcgcccattcacccccctcacccacctccccgcgttcccacttccccgcactctgacccggccggacgcccctcccctatcttgccgcccgccccctccagggggctctgctcccaccccagggagcccatccgacctctgcttgacttcccgccgcttccttcaggggcctcggctcatcgggtgcccctccccaaacttccaacccgtttgctccaggagttcctgccccatccccgagggcgcccaaatagccacactgtgtcctcctgtagtcgccgccccctgacctagcgcgacccagcgcccccgcccatgtccccccactcacctcccccggggggcgtggtgagtcgcggtctgttctcacggacggtccccgtccagcctgcgcttcgccggggccctcatctgctttcccgccaccctatcactcccttgccgtccaccctcggtcctcatggtcccagagccgggcccaaccgccaatagcaccccggcctggggggcagggccgccgtcggccccggggggcagcggctgggtggcggccgcgctgtgcgtggtcatcgcgctgacggcggcggccaactcgctgctgatcgcgctcatctgcactcagcccgcgctgcgcaacacgtccaacttcttcctggtgtcgctcttcacgtctgacctgatggtggggctggtggtgatgccgccggccatgctgaacgcgctgtacgggcgctgggtgctggcgcgcggcctctgcctgctctggaccgccttcgacgtgatgtgctgcagcgcctccatcctcaacctctgcctcatcagcctggaccgctacctgctcatcctctcgccgctgcgctacaagctgcgcatgacgcccctgcgtgccctggccctagtcctgggcgcctggagcctcgccgctctcgcctccttcctgcccctgctgctgggctggcacgagctgggccacgcacggccacccgtccctggccagtgccgcctgctggccagcctgccttttgtccttgtggcgtcgggcctcaccttcttcctgccctcgggtgccatatgcttcacctactgcaggatcctgctagctgcccgcaagcaggccgtgcaggtggcctccctcaccaccggcatggccagtcaggcctcggagacgctgcaggtgcccaggaccccacgcccaggggtggagtctgctgacagcaggcgtctagccacgaagcacagcaggaaggccctgaaggccagcctgacgctgggcatcctgctgggcatgttctttgtgacctggttgcccttctttgtggccaacatagtccaggccgtgtgcgactgcatctccccaggcctcttcgatgtcctcacatggctgggttactgtaacagcaccatgaaccccatcatctacccactcttcatgcgggacttcaagcgggcgctgggcaggttcctgccatgtccacgctgtccccgggagcgccaggccagcctggcctcgccatcactgcgcacctctcacagcggcccccggcccggccttagcctacagcaggtgctgccgctgcccctgccgccggactcagattcggactcagacgcaggctcaggcggctcctcgggcctgcggctcacggcccagctgctgcttcctggcgaggccacccaggaccccccgctgcccaccagggccgctgccgccgtcaatttcttcaacatcgaccccgcggagcccgagctgcggccgcatccacttggcatccccacgaactgacccgggcttggggctggccaatggggagctggattgagcagaacccagaccctgagtccttgggccagctcttggctaagaccaggaggctgcaagtctcctagaagccctctgagctccagaggggtgcgcagagctgaccccctgctgccatctccaggccccttacctgcagggatcatagctgactcagatatcgtgttctgaaggatgctccactgttgagtgtaacttgtgtgtgcagaggatgggctggaggactctggatgttggggagaaggacctcttggttcaggttaggatgaaaacaatcatgacctttgcccattctgtcaggctggacgggagggaatgcccccacctgcaggcatggattaatgctgggctgaaccccttgctactcacagtgtagtccatggacaatcggcattgccgtcacctttgggagtttgtgaaaaatgcacatctctgcccctgcccagatctgctgagtcagaactgcatgttaccaagatcccaggtgaatcatgtgcccattacagtttgagatgtgctgccttagatcatctttaaccctcagaatgatttgctggatggtttttggacctgtcagtctcccctccctggtatatatgtggcagcagctgcacctgggaggcaggcaggcatgcatgtgggcctctgctctaccacctatgagctctggggcctgacacgagttacttaacctctccgagcctcggttatcccatgtgtaaggtagagaaatgatgcctatcttgcaggttgtcttgagaattaagacaatgtgtgcccagcacccagtacacggtcagttaattggtacgttctgttgttacgacccccggctatccagccccctggcctctccggctgtgtgtcaggaagggctctttgctcccgttgttctctttccatttgcctccccctcttcagccctggcctagcctcccaaagcctgactctggttccccaactccctgttctggctcctgggtggggactccatctctcagggaccctcccagctcccaagctgctgccctgcctttcctgggggcaaaaggggcaggtggcagtttttttttcagcctcagaactggttttcctcaatcctggggggtccttggacctagaagggaacaactgatggggataaacccagccccttgcccacctgcctntggccttccctggggtcagtgagagaaatgggaatggtagctacttgggtcagcagagtagagtcaaagagctgttcctggtgtgaggtggggcccacgaggcaggcaggtggactctggcacaggggccttggtttctgggggcagggggttggggaactcttggtcgccnagtttacctgccataggtcccttttcanccctgcctcccccaagttccatcaanacaaactcccagggggtcctccatncctggcctggccctctccttggtgctgatgagacacaactctggccccggcggctggcctctgaggggccatggtgcttgcggggcttcccctatcccccaggtctgcccaaggggactctcaataaactctagctgaaggcaaaaaaaaaaaaaaaaaaaaaaaaaaaaaaaaaaaaaaaa

SEQ ID NO: 193 - DNA, 1908 bp, Homo sapiens
gaaagatggcgtcctcggagcaggcagagcagccgagccagccaagctctactccaggaagtgaaaatgtgctgcctcgagagccgctgattgccacggcagtgaagtttctacagaattcccgggtccgccagagcccacttgcaaccaggagagcatttctaaagaagaaagggctgacagatgaagagattgatatggccttccagcagtcgggcactgctgccgatgagccttcgtccttgggcccagccacacaggtggttcctgtccagccccctcacctcatatctcagccatacagtcccgcaggctcccgatggcgagattacggcgccctggccatcatcatggcaggcattgcatttggctttcaccagctctacaagaaatacctgctccccctcatcctgggcggccgagaggacagaaagcagctggagaggatggaggccggtctctctgagctgagtggcagcgtggcccagacagtgactcagttacagacgaccctcgcctccgtccaggagctgctgattcagcagcagcagaagatccaggagcttgcccacgagctggccgctgccaaggccaccacatccaccaactggatcctggagtcccagaatatcaacgaactcaagtccgaaattaactccttgaaagggcttcttttaaatcggaggcagttccctccatccccatcagccccgaagatcccctcctggcagatcccagtcaagtcaccgtcaccctccagccctgcggccgtgaaccaccacagcagcagcgacatctcacctgtcagcaacgagtccacgtcgtcctcgcctgggaaggagggccacagccccgagggctccacggtcacctaccacttgctgggcccccaggaggaaggcgagggggtggtggacgtcaagggccaggtgcggatggaggtgcaaggcgaggaggagaagagggaggacaaggaggacgaggaggatgaggaggatgatgatgtgagccatgtggacgaggaggactgcctgggggtgcagagggaggaccgccggggcggggatgggcagatcaacgagcaggtggagaagctgcggcggcccgagggcgccagcaacgagagtgagcgggactagggctgcgcctgctgcctccagccctgaggatggcatctagtgtgcccgtgcgtggccataccctgcctccctctctggccctgggagggcagcttggagcccaggtagggggcagagctgtcctcagctgcactgcggcctggtggcagtgtggggagtcacacttctgtccacctggcctcctctcgcctggccgccagccccagccccagccccagccccaggcccagctgcctttggctttgatctcaagtcaggctgaaggcagcgaagcctcggggcccaagcccctccccagccccctctcccggacagacgccttgcccagggtgtgtttgctgagtgtcttgactaccgtgacaccacgcatggccagagctagcgtccctactgcctcccgactcctcagtggaggaggagctgcggtccctctggtgtctgccatccccctccctccctgggcccggccctggacccgtcaggtgcctgtccccagccccaaccccactcatgccccgtcgtcctcccagacaaatgaaaccacgctgcgcttccgatgcccccgcttgccgtgtaatggttcagctaatcccatggcgagatgggggctcattccggaggaggagccaggcagcagggccttcctgaccaacagccagttttgtccttccccccaggaaaaaaatgttcatttgtgtgatcatgtatagacctcagaacggaagataggactgtatataattgtaataaataccagttgccactattt

SEQ ID NO: 194 - DNA, 785 bp, Homo sapiens
  misc_feature (73)..(73): n is a, c, g, or t
  misc_feature (86)..(86): n is a, c, g, or t
  misc_feature (105)..(105): n is a, c, g, or t
  misc_feature (110)..(110): n is a, c, g, or t
  misc_feature (122)..(122): n is a, c, g, or t
cgcacagagcggcctgtctttatcagaggtccctctgccagggggagggccccagagaaaaccagaaagaggntgagagactgagnaagataaagcgtcccaggncctcntacaccagcgcntgagcaggaagggggaggggccatgactacgaggccctgggaggtcactttagggagggctgtcctgaaacctggagcctggagcagaaagtgaaaccctggtgctccagacaaagatcttagtcgggactagccggccaaggatgaagcctcacttcagaaacacagtggagcgaatgtatcgagacacattctcctacaacttttataatagacccatcctttctcgtcggaataccgtctggctgtgctacgaagtgaaaacaaagggtccctcaaggccccgtttggacgcaaagatctttcgaggccaggtgcccaggtctttcatcagagccccatttcaagtgctcagtagcccctttggccagtgcgccccaccacatgggacagcgcaggtccagtggcctccccagctgaccgcaggcagggaacaaggcagaccctagagggccaggccacagcaggggctgaggatgcctggtgaatggatgcctgggagaatggatgccagaattcacgcatgaggctctgaacagggctgggaaaacttccaaacgaagggaagctcatgtcttggtgcactttgtgatgatgcttcaacagcaggactgagatggggacatttacaataaacagaaatgtatgggctcgaaaaaaaaa

SEQ ID NO: 195 - DNA, 2881 bp, Homo sapiens
acagaagtgctagaagccagtgctcgtgaactaaggagaaaaagaacagacaagggaacagcctggacatggcatcagagatccacatgacaggcccaatgtgcctcattgagaacactaatgggcgactgatggcgaatccagaagctctgaagatcctttctgccattacacagcctatggtggtggtggcaattgtgggcctctaccgcacaggcaaatcctacctgatgaacaagctggctggaaagaaaaagggcttctctctgggctccacggtgcagtctcacactaaaggaatctggatgtggtgtgtgccccaccccaagaagccaggccacatcctagttctgctggacaccgagggtctgggagatgtagagaagggtgacaaccagaatgactcctggatcttcgccctggccgtcctcctgagcagcaccttcgtgtacaatagcataggaaccatcaaccagcaggctatggaccaactgtactatgtgacagagctgacacatagaatccgatcaaaatcctcacctgatgagaatgagaatgaggttgaggattcagctgactttgtgagcttcttcccagactttgtgtggacactgagagatttctccctggacttggaagcagatggacaacccctcacaccagatgagtacctgacatactccctgaagctgaagaaaggtaccagtcaaaaagatgaaacttttaacctgcccagactctgtatccggaaattcttcccaaagaaaaaatgctttgtctttgatcggcccgttcaccgcaggaagcttgcccagctcgagaaactacaagatgaagagctggaccccgaatttgtgcaacaagtagcagacttctgttcctacatctttagtaattccaaaactaaaactctttcaggaggcatccaggtcaacgggcctcgtctagagagcctggtgctgacctacgtcaatgccatcagcagtggggatctgccgtgcatggagaacgcagtcctggccttggcccagatagagaactcagctgcagtgcaaaaggctattgcccactatgaacagcagatgggccagaaggtgcagctgcccacagaaagcctccaggagctgctggacctgcacagggacagtgagagagaggccattgaagtcttcatcaggagttccttcaaagatgtggaccatctatttcaaaaggagttagcggcccagctagaaaaaaagcgggatgacttttgtaaacagaatcaggaagcatcatcagatcgttgctcaggtttacttcaggtcattttcagtcctctagaagaagaagtgaaggcgggaatttattcgaaaccagggggctatcgtctctttgttcagaagctacaagacctgaagaaaaagtactatgaggaaccgaggaaggggatacaggctgaagagattctgcagacatacttgaaatccaaggagtctatgactgatgcaattctccagacagaccagactctcacagaaaaagaaaaggagattgaagtggaacgtgtgaaagctgagtctgcacaggcttcagcaaaaatgttgcaggaaatgcaaagaaagaatgagcagatgatggaacagaaggagaggagttatcaggaacacttgaaacaactgactgagaagatggagaacgacagggtccagttgctgaaagagcaagagaggaccctcgctcttaaacttcaggaacaggagcaactactaaaagagggatttcaaaaagaaagcagaataatgaaaaatgagatacaggatctccagacgaaaatgagacgacgaaaggcatgtaccataagctaaagaccagagccttcctgtcacccctaaccaaggcataattgaaacaattttagaatttggaacaagcgtcactacatttgataataattagatcttgcatcataacaccaaaagtttataaaggcatgtggtacaatgatcaaaatcatgttttttcttaaaaaaaaaaaaaagactgtaaattgtgcaacaaagatgcatttacctctgtatcaactcaggaaatctcataagctggtaccactcaggagaagtttattcttccagatgaccagcagtagacaaatggatactgagcagagtcttaggtaaaagtcttgggaaatatttgggcattggtctggccaagtctacaatgtcccaatatcaaggacaaccaccctagcttcttagtgaagacaatgtacagttatccattagatcaagactacacggtctatgagcaataatgtgatttctggacattgcccatgtataatcctcactgatgatttcaagctaaagcaaaccaccttatacagagatctagaatctctttatgttctccagaggaaggtggaagaaaccatgggcaggagtaggaattgagtgataaacaattgggctaatgaagaaaacttctcttattgttcagttcatccagattataacttcaatgggacactttagaccattagacaattgacactggattaaacaaattcacataatgccaaatacacaatgtatttatagcaacgtataatttgcaaagatggactttaaaagatgctgtgtaactaaactgaaataattcaattacttattatttagaatgttaaagcttatgatagtcttttctaattcttaacactcatacttgaaatctttccgagtttccccagaagagaatatgggattttttttgacatttttgacccatttaataatgctcttgtgtttacctagtatatgtagactttgtcttatgtgtcaaaagtcctaggaaagtggttgatgtttcttatagcaattaaaaattatttttgaactga

SEQ ID NO: 196 - DNA, 5857 bp, Homo sapiens
cggcgcaggcggcggcgtccgaggagatttaatccagagactgacttcactatagaacccacagttgtatcaatggttggggaaagatagtggcaacaggcaaaggagaaacagctctgacatacaaagaaaatgagtatgctaaagccaagtgggcttaaggcccccaccaagatcctgaagcctggaagcacagctctgaagacacctacggctgttgtagctccagtagaaaaaaccatatccagtgaaaaagcatcaagcactccatcatctgagactcaggaggaatttgtggatgactttcgagttggggagcgagtttgggtgaatggaaataagcctggatttatccagtttcttggagaaacccagtttgcaccaggccagtgggctggaattgttttagatgaacccataggcaagaacgatggttcggtggcaggagttcggtatttccagtgtgaacctttaaagggcatatttacccgaccttcaaagttaacaaggaaggtgcaagcagaagatgaagctaatggcctgcagacaacgcccgcctcccgagctacttcaccgctgtgcacttctacggccagcatggtgtcttcctccccctccaccccttcaaacatccctcagaaaccatcacagccagcagcaaaggaaccttcagctacgcctccgatcagcaaccttacaaaaactgccagtgaatctatctccaacctttcagaggctggctcaatcaagaaaggagaaagagagctcaaaatcggagacagagtattggttggtggcactaaggctggtgtagtccggtttcttggggagaccgactttgccaagggggagtggtgtggcgtggagttagatgagccacttgggaagaatgatggcgctgttgctggaacaaggtattttcagtgtcaacccaaatatggcttgttcgctcctgtccacaaagttaccaagattggcttcccttccactacaccagccaaagccaaggccaacgcagtgaggcgagtgatggcgaccacgtccgccagcctgaagcgcagcccttctgcctcttccctcagctccatgagctcagtggcctcctctgtgagcagcaggcccagtcggacaggactattgactgaaacctcctcccgttacgccaggaagatctccggtaccactgccctccaggaggccctgaaggagaagcagcagcacattgagcagctgctggcggaacgggatctggagagggcggaggtggccaaggccacgagccacgtgggggagatagagcaggagctagctctggcccgggacggacatgaccagcatgtcctggaattggaagccaaaatggaccagctgcgaacaatggtggaagctgctgacagggagaaggtggagcttctcaaccagcttgaagaggagaaaaggaaggttgaggaccttcagttccgggttgaagaagaatcaattaccaaaggtgatcttgagacgcagaccaaactggagcatgcccgcattaaggagcttgaacagagcctgctctttgaaaagaccaaagctgacaaactccagagggagttagaagacactagggtggctacagtttcagaaaagtcacgtataatggaactggagaaagacctagcattgagagtacaggaagtagctgagctccgaagaaggctagagtccaataagcctgctggggatgtggacatgtcactttcccttttgcaagagataagctctttgcaagaaaagttagaagtcacccgtactgaccaccagagagaaataacttctctgaaggagcattttggagcccgggaagaaactcatcagaaggagataaaggctctgtataccgccacggaaaagctttccaaagagaacgagtcattgaaaagcaagctggagcatgccaacaaagagaactcagatgtgatagctctatggaagtccaaactggagactgccatcgcatcccaccagcaggcgatggaagaactgaaggtatctttcagcaaagggcttggaacagagacggcagaatttgctgaactaaaaacacaaatagagaaaatgagactagattaccaacacgaaatagaaaatttgcagaatcaacaagactctgaacgggctgcccatgctaaagagatggaagccttgagggctaaactgatgaaagttattaaagaaaaggaaaacagtctggaagccatcaggtcgaaactggacaaagcagaagaccagcatctcgtagaaatggaagacacgttaaacaaattacaggaagctgaaataaaggtaaaggagctagaggtactgcaagccaaatgcaatgaacaaaccaaggttattgataattttacatcacagctcaaggctactgaagaaaagctcttggatcttgatgcacttcggaaagccagttccgaaggtaaatcggaaatgaagaaacttagacagcagcttgaggcagctgagaaacagattaaacatttagagattgaaaagaatgctgaaagtagcaaggctagtagcattaccagagagctccaggggagagagctaaagcttactaaccttcaggaaaatttgagtgaagtcagtcaagtgaaagagactttggaaaaagaacttcagattttgaaagaaaagtttgctgaagcttcagaggaggcagtctctgttcagagaagtatgcaagaaactgtaaataagttacaccaaaaggaggaacagtttaacatgctgtcttctgacttggagaagctgagagaaaacttagcagatatggaggcaaaatttagagagaaagatgagagagaagagcagctgataaaggcaaaggaaaaactggaaaatgacattgcagaaataatgaagatgtcaggagataactcttctcagctgacaaaaatgaacgatgaattacgtctgaaagaaagagatgtagaagaattacagctaaaacttacaaaggctaatgaaaatgcaagttttctgcaaaaaagtattgaggacatgactgtcaaagctgaacagagccagcaagaagcagctaaaaagcatgaggaagaaaagaaagaattggagaggaaattgtcggacctggaaaagaaaatggaaacaagccacaaccagtgtcaggagctgaaagccaggtatgagagagccacttctgagacaaaaaccaagcatgaagaaatcctacagaacctccagaagacgctgctggacacagaggacaagctgaagggcgcacgggaggagaacagtggcttgctgcaggagctggaggagctgagaaagcaagccgacaaagccaaagctgctcaaacagcggaagatgccatgcagataatggaacagatgaccaaagagaagactgagactctggcctccttggaggacaccaagcaaacaaatgcaaaactacagaatgaattggacacacttaaagaaaacaacttgaaaaatgtggaagagctgaacaaatcaaaagaactcctgactgtagagaatcaaaaaatggaagaatttaggaaagaaatagaaaccctaaagcaggcagcagctcagaagtcccagcagctttcagcgttgcaagaagagaacgttaaacttgctgaggagctggggagaagcagggacgaagtcacaagtcatcaaaagctggaagaagaaagatctgtgctcaataatcagttgttagaaatgaaaaaaagagaatccaagttcataaaagacgcagatgaagagaaagcttccttgcagaaatccatcagtataactagtgccttactcacagaaaaggatgccgagctggagaaactgagaaatgaggtcacagtgctcaggggagaaaacgcctctgccaagtccttgcattcagttgttcagactctagagtctgataaggtgaagctcgagctcaaggtaaagaacttggagcttcaactcaaagaaaacaagaggcagctcagcagctcctcaggtaatacagacactcaggcagacgaggatgaaagagcccaggagagtcagattgatttcctaaattcagtaatagtggaccttcaaaggaagaatcaagacctcaagatgaaggtggagatgatgtcagaagcagccctgaatgggaacggggatgacctaaacaattatgacagtgatgatcaggagaaacagtccaagaagaaacctcgcctcttctgtgacatttgtgactgctttgatctccacgacacagaggattgtcctacccaggcacagatgtcagaggaccctccccattccacacaccatggcagtcggggtgaggaacgcccatactgtgaaatctgtgagatgtttggacactgggccaccaactgcaatgacgacgaaaccttctgatgaagcctccagtggagaactgggcttgctcagacgcactcgcattgacacaacgtaacaccagcattgtgtgtgcagacttcaggagaactcatgttattttttaaccccgtcaacaaatctaggaaaatattttgatcttcaacaaattgccctttagtctccccgtatgagttagaataataaatatttagtaggtgagttttcacctcgaattttgttttcttgatttttacgtttgaagacattgcaccagatgccattacatttattggccccccgaccttgtagaaaaacccctaccctcacaataccttatttaagtaactttaaattatgccgttacttttcatatttgcacctaagatatttccaggctgcatttgtatatttagattttttggttaagctttgacactggaatgagttgaaaaaatgtgccattttgcattttcatctactcatttaaagtattttattcttattcaaagaaatatctgagctctttgcactacctgttatcagtagtgcctttacttcaggcttgataatacttaggtgtgattataaaatcatgaagcaggtaaagggaggggcaagccccaaactgctgtggggacattttataatctatatgctgcacccacttaatctactgtggtgttttgtttattagttttgcataatttcagcttctatatattgtatgtatatattttttaaaaatctatattttgggaaaaaaacatacacaatgtgtctttctttttggacatttacctttttgaaaaagaaaacacttaaaatgatcattaggacataacagactaggccagacatagcatcttgtggctttgcaaccattttcatttgtttgttttccttttatttcttcaccagatttaaataaaaggaggaattttctccaatttttttttccttctctggcaggtatccccagcagtcaattaacaataagccagtataaaacacctaaataaccaatctacaatctcccttcacaagtttttttactgtttttagatgaatgtacgatgagaaattcaacgttaataattctggattttcttatcacaaaaaagaaaatgaaggacctcaaagcacctgaacagtttatcgaccagtttgaatctatttatcttcatttgaatgtcttctagatatgtaaaaagtcataaaatgtatcttccatgctacatgtacaataagaacttctataattgtatatatgcctttgatgtattttcccctcaagattatcaactgtgtgttcgacagtgaatattcaatctggtaccagttgaaatttttggttataaatgtaatacgaattgtttcacaaacagaaaacatgtaaagcagtattaaaatttggccaaacaagtgttctgtatctacttttaataaatggttattcttt

SEQ ID NO: 197 - DNA, 624 bp, Homo sapiens
ggcgggccgctcccacttcggcacgaggggcacgaggtaaatcttttctgcttactgaaaaggaagagtctgatgattagttactgatcctctttgcatttgtaaagctttggagatattgaatcatgttaccatttctgtttttttccaccctgttttcttccatatttactgaagctcagaagcagtattgggtctgcaactcatccgatgcaagtatttcatacacctactgtgataaaatgcaatacccaatttcaattaatgttaacccctgtatagaattgaaaggatccaaaggattattgcacattttctacattccaaggagagatttaaagcaattatatttcaatctctatataactgtcaacaccatgaatcttccaaagcgcaaagaagttatttgccgaggatctgatgacgattactctttttgcagagctctgaagggagagactgtgaatacaacaatatcattctccttcaagggaataaaattttctaagggaaaatacaaatgtgttgttgaagctatttctgggagcccagaagaaatgctcttttgcttggagtttgtcatcctacaccaacctaattcaaattagaataaattgagtattt

SEQ ID NO: 198 - DNA, 4966 bp, Homo sapiens
  misc_feature (272)..(272): n is a, c, g, or t
  misc_feature (397)..(397): n is a, c, g, or t
  misc_feature (610)..(610): n is a, c, g, or t
  misc_feature (616)..(616): n is a, c, g, or t
  misc_feature (1002)..(1003): n is a, c, g, or t
  misc_feature (1030)..(1030): n is a, c, g, or t
  misc_feature (1057)..(1057): n is a, c, g, or t
  misc_feature (1224)..(1224): n is a, c, g, or t
  misc_feature (1229)..(1229): n is a, c, g, or t
  misc_feature (1241)..(1241): n is a, c, g, or t
  misc_feature (1440)..(1440): n is a, c, g, or t
  misc_feature (1502)..(1502): n is a, c, g, or t
  misc_feature (2169)..(2169): n is a, c, g, or t
  misc_feature (2188)..(2188): n is a, c, g, or t
  misc_feature (2331)..(2331): n is a, c, g, or t
  misc_feature (2394)..(2394): n is a, c, g, or t
  misc_feature (2449)..(2449): n is a, c, g, or t
  misc_feature (2904)..(2904): n is a, c, g, or t
  misc_feature (4415)..(4415): n is a, c, g, or t
aaggcatccaggatgcggtgcggggcggcccggtgcccccccgccccgtcacggcagccgcggcggccgaggggaccgggccagggccgggggcggcggcccgagccgcggtagcggcggcggcgggaggggcggcctgagggcggacgggcgggcgcccgggttgcgggggctcggtgccgctccgcactgcccggccggtctcggccccggcgccatgagtggcggcggcggcggagggggctcggcgcccagtcgcttcgccgactacnttgtcatctgcggactggacacggagaccgggctggagccggacgagctgtcggcattatgccagtacatacaggcttctaaagccagggatggtgccagccctttcatttcaagtacgactganggagaaaattttgagcagacaccattgagaagaacattcaaatctaaggtccttgcacgatatcctgagaacgtagaatggaatccctttgaccaagatgcagtaggaatgctatgtatgccgaaagggctggcattcaagacccaggctgatcccagggagccccaattccatgcctttattatcacaagggaggatggctctcggacattngggttngccctcacattttatgaagaggtgactagcaagcagatctgcagtgcaatgcagaccctctaccacatgcacaatgctgagtatgatgtcctacatgctccccctgctgatgacagagaccagagcagcatggaggatggtgaagacactcctgtgaccaaactgcagcgcttcaactcctatgacattagccgggacactctctacgtctctaagtgcatctgcctcatcacacccatgtctttcatgaaggcatgtcggagcgtgctggagcaactccaccaggcagtcacttcacctcagccccctccactgccccttgagagctacatatacaacgtactctacgaggtgccgctcccacctcctggccggtccttgaagtnntctggggtctatgggccaataatctgncagagaccaagtaccaatgagcttccnctatttgactttcctgtcaaagaggtttttgaactgctcggggtggagaatgtgtttcagctttttacttgtgcccttctggagtttcaaatcctgctctactcacagcattaccagagactgatgactgtggcggagacgattacagctctcatgtttcctttccnagtgncagcatgtctantgtccctattctcccagcttctctcctgcatttcttagatgctcctgttccatacctgatgggtttgcattccaatggcctggatgaccggtcaaagctggagctgcctcaagaggctaacctctgctttgtggacattgacaaccacttcattgagttgccagaggacttgccacagttccccaacaaattggagttngtccaggaagtctctgagattctcatggcatttggaattccccctgaagggaatcttcattngcagtgagagtgcctccaagctgaagaggctgcgggcctctgagcttgtctcggacaagaggaatgggaacattgctggctcccctttgcattcctacgagcttcttaaggagaatgaaactattgcccggctgcaagccttggtcaagagaactggggtgagcctggaaaagttggaagtgcgtgaagaccccagcagcaataaggatctcaaagttcagtgtgatgaagaagaactcaggatttaccagctaaacattcagatccgggaagtttttgcaaatcgtttcactcagatgtttgcagattatgaggtgtttgtcatccaacccagccaggataaggaatcctggtttaccaacagggagcaaatgcaaaactttgataaagcatcttttctgtcagatcagcctgagccctacctgcccttcctctcaagattcctggagacccagatgtttgcatctttcattgacaacaaaataatgtgtcatgatgatgatgataaagaccctgtactccgggtatttgattcccgagttgacaagatcaggctgttgaatgttcggacacctactctccgtacatccatgtaccagaagtgtaccactgtggatgaagcagagaaagcaattgagctgcgtctggcaaaaattgaccatactgnaattcacccacatttactngacatgaagattggacaagggaaatatgagccgggcttcttccctaagctgcagtctgatgtactttccactgggccagccagcaacaagtggacgaaaaggaatgcccctgcccagtggaggcggaaagatcggcagaagcngcacacagaacacctgcgtttagataatgaccagagggagaagtacatccaggaagccaggantatgggcagcactatccgccagcccaaactgtccaacctctctccatcagtgatngcccagaccaattggaagtttgtagagggcctgctgaaggaatgccgcaataagaccaagaggatgctggtggaaaagatgggccgagaagctgtggagctagggcatggggaggtgaacatcacaggggtggaagagaacaccctgattgccagcctttgtgatctcctggaaaggatctggagtcatggactacaagtgaaacaggggaaatcagccttatggtcccacctgttacattatcaggacaaccggcagagaaaactcacatcaggaagcctcagtacctcaggaatacttcttgattcagaacgtaggaagtctgatgccagctcactcatgcctcccctgaggatctccctgattcaggatatgaggcacatccagaacatcggggaaatcaagactgatgtgggaaaggccagagcatgggtgcgactgtccatggaaaaaangttactttccagacacctgaagcagctcctctcagaccatgagctcaccaaaaagttatataagcgctatgccttcctgcgctgtgatgacgagaaggagcagttcctctatcacctcctgtctttcaatgccgtcgattacttttgcttcaccaatgtcttcacaactatcctgatcccgtaccacattctgatcgtaccaagcaagaagctggggggctccatgttcactgccaacccatggatctgtatatcaggagaattgggtgagacacagatcatgcagattcccaggaatgtgctagagatgaccttcgagtgccagaacttggggaagcttactactgtccagattggccatgataactctgggctgtatgccaaatggctggtggagtatgtgatggtcaggaatgagatcacaggacatacctacaagttcccgtgtggccggtggttagggaagggcatggatgatggaagcctggagcggatcctagttggggagctgctcacatcccagcctgaggtggatgagaggccatgccggaccccgccgctgcagcagtcccccagtgtcatccggaggcttgttaccatctcacccaacaacaagcccaagctgaacactgggcagatccaggagtccatcggggaggcagtcaatggcattgtgaagcacttccataagcctgagaaagagcgaggcagtctgacgctgttgctctgtggagagtgtggccttgtctcggccttggaacaggctttccagcatggatttaaatcgccccggctcttcaaaaatgtcttcatttgggatttcctggaaaaagcacaaacctattatgagacattagagaagaatgaagtagtccctgaggaaaactggcatacaagagcccggaacttctgccgatttgtcactgcaatcaacaatactccccggaacatcggcaaggatggcaagtttcagatgctggtgtgcttgggagccagagatcacctcctacaccactggattgccctgctggctgactgccccatcactgcacacatgtatgaggatgtggcactgatcaaagaccatacacttgtcaattccttgattcgtgtgctgcagacattgcaggagttcaacatcacgctggagacgtcccttgtcaagggcatcgacatctgacctcccagcaccagccagcagcaggactgagaaagactcaccctgcagctctgaccttttttcccaaagggacttaagcgattgtgcaggagtaggagacaaaatgtacactcactgtaaaaagaaaactagaggatttttggaataaataatctattttagagtttatttgctgatttgctttttacacactttcatgtgaaagagtgatagggagagggagcgaggctggtgccgcttattttgaagctggtgccctccctcgccgtggccacatgctggaagcctgaggcctccctggactgagcctgtggcactgcgtgcgggacangttatgtttccttgccccgtcgcattaatgaggcccttccacatcatttttaaactaatgtttttctatattaacattattatggatatttggctttcataggccacacacaggtgtgctgcgcgggaagccccatgctccaatcaaagggatttttagtagtgcctctaagcaagcaccgatgagtcagtcccacgtattttcttttttgtcagtattgtttgggaaggagacatgccgggatgtgtcatcgtgccaaataccacatttcctgttggcacagtttcacagaagtaaacataagcatgttttaacaggtttttcttttcttttttcttttttaaaatgttttatttatttaacccgccattgtgtgtttttaagtattttctttttttaaggaaaggaaaagcttgtcacaatctaactggctatgttattattattaaatttatgttttgcaacttagaaaccagctacagtatggcccacttaataaaacacctgaaacaaaaaaaaaaaaaaaaaaaaaaaaaaaaaaaatattaaaa

SEQ ID NO: 199 - DNA, 1950 bp, Homo sapiens
ggcacgagggaaccgtccgcagccgccggagccgggagccctgcccaagtcggagcggcgtcccctgctgagccccgagcgccgggccagcagccggatgcccgggcccactgggcgggccagtggccgcctgcgggatgagcagactgctgggggggacgctggagcgcgtctgcaaggctgtgctccttctctgcctgctgcacttcctcgtggccgtcatcctctactttgacgtctacgcccagcacctggccttcttcagccgcttcagtgcccgaggccctgcccatgccctccacccagctgctagcagcagcagcagcagcagcaactgctcccggcccaacgccaccgcctctagctccgggctccctgaggtccccagtgccctgcccggtcccacggctcccacgctgccaccctgtcctgactcgccacctggtcttgcgggtgcacagggagaacccaggcgtgctcatgggcggccgatacacaccgcccgactgcaccccagcccagacggtggcggtcatcatcccctttagacaccgggaacaccacctgcgctactggctccactatctacaccccatcttgaggcggcagcggctgcgctacggcgtctatgtcatcaaccagcatggtgaggacaccttcaaccgggccaagctgcttaacgtgggcttcctagaggcgctgaaggaggatgccgcctatgactgcttcatcttcagcgatgtggacctggtccccatggatgaccgcaacctataccgctgcggcgaccaaccccgccactttgccattgccatggacaagtttggcttccggcttccctatgctggctactttggaggtgtgtcaggcctgagtaaggctcagtttctgagaatcaatggcttccccaatgagtactggggctggggtggcgaggatgatgacatcttcaaccggatctccctgactgggatgaagatctcacgcccagacatccgaattggccgctaccgcatgatcaagcacgaccgcgacaagcataacgaacctaaccctcagaggtttaccaagattcaaaacacgaagctgaccatgaagcgggacggcattgggtcagtgcggtaccaggtcttggaggtgtctcggcaaccactcttcaccaatatcacagtggacattgggcggcctccgtcgtggccccctcggggctgacactaatggacagaggctctcggtgccgaagattgcctgccagaggactgaccacagcctggctggcagctgctctgtggaggacctccaggactgagactgggctctgttttccaagggtcttcactaggccccctagctacacctggaagtttcagaacccactttggggggcctcctgcctgggcaggctcttcaagtgtggccctctttggagtcaaccctccttcccgaccccctccccctagcccagccccagtcactgtcagggtcgggccagcccctgcactgcctcgcagagtggcctgggctaggtcactccacctctctgtgcctcagtttcccccccttgagtcccctagggcctggaagggtgggaggtatgtctagggggcagtgtctcttccagggggaattctcagctcttgggaacccccttgctcccaggggaggggaaacctttttcattcaacattgtagggggcaagctttggtgcgccccctgctgaggagcagccccaggaggggaccagaggggatgctgtgtcgctgcctgggatcttggggttggcctttgcatgggaggcaggtggggcttggatcagtaagtctggttcccgcctccctgtctgagagaggaggcaggagccccagggccggcttgtgtttgtacattgcacagaaacttgtgtgggtgctttagtaaaaaacgtgaatggaaaaaaaaaaaaaaaaaaa

SEQ ID NO: 200 - DNA, 968 bp, Homo sapiens
  misc_feature (210)..(211): n is a, c, g, or t
  misc_feature (222)..(222): n is a, c, g, or t
  misc_feature (264)..(264): n is a, c, g, or t
  misc_feature (957)..(957): n is a, c, g, or t
agactcgagagatcatccctttgtctgcattgacggccctgtgacggcctccagcccacaggcctgctttctcctgtcctaacaccaagcctggggaccacacataacagtcttcactcctgcaaggtccacagtcccgtgcttctggagcacctccttatccctcctgttccaaaagcctctggcgtgtttccatcacaatctcctccnntatttctggcntttaagatgtctttgatctgatgtggaagggatgcttcatancagtacaggatgctggtatcatacagcatcatcctctgagttaccagcgagatgatgcagttccgaagccgggatatcacctctcgatcagcaagagagacaggctccaggtttgcaatgaagccccctgcttcctcttctttgtgctcaggtgttgggtaaatccagatgaagccgttgttaccgagaatcactgaggcaccacatggcaaatcatgaaagtgggtcttctgccgtttcaccagggagggggaaacctggaccaaaaccccctgacctagttttccatatttcaggctcctcgtgtgcaaagagacagctccgtcagagaacactgcctggacctcagcactgataaggtccccttcctgtaagaaacctctcattgcaagctcatcttctgcagatcttctcctctctgtgattcgtcccactacgatgtctcctacttcaccaatgtatctggttttcaaagctttcacacagatcaacttgtttactctctccacagagccagcaacagatgcaatgagcttctcttctcccatatacgttccatggccccgcatgaatcctgtgtccgtagtgattgtatcccccggcaccactagatgtttcttagtgtcgcggcccagtctctcgctaagaggcttgcgagccactggaagcctcatctccatcgccatcttggcnccaatgagttg

SEQ ID NO: 201 - DNA, 6840 bp, Homo sapiens
  misc_feature (149)..(149): n is a, c, g, or t
  misc_feature (363)..(365): n is a, c, g, or t
  misc_feature (526)..(526): n is a, c, g, or t
  misc_feature (1064)..(1064): n is a, c, g, or t
  misc_feature (1068)..(1068): n is a, c, g, or t
  misc_feature (1219)..(1219): n is a, c, g, or t
  misc_feature (1340)..(1340): n is a, c, g, or t
  misc_feature (1775)..(1775): n is a, c, g, or t
  misc_feature (1825)..(1825): n is a, c, g, or t
  misc_feature (2197)..(2197): n is a, c, g, or t
  misc_feature (2298)..(2298): n is a, c, g, or t
  misc_feature (2379)..(2379): n is a, c, g, or t
  misc_feature (2401)..(2401): n is a, c, g, or t
  misc_feature (2434)..(2434): n is a, c, g, or t
  misc_feature (2439)..(2441): n is a, c, g, or t
  misc_feature (2451)..(2451): n is a, c, g, or t
  misc_feature (2454)..(2460): n is a, c, g, or t
  misc_feature (2479)..(2479): n is a, c, g, or t
  misc_feature (2966)..(2966): n is a, c, g, or t
  misc_feature (2968)..(2975): n is a, c, g, or t
  misc_feature (2977)..(2977): n is a, c, g, or t
  misc_feature (2979)..(2983): n is a, c, g, or t
  misc_feature (2985)..(2986): n is a, c, g, or t
  misc_feature (2991)..(2991): n is a, c, g, or t
  misc_feature (2995)..(2996): n is a, c, g, or t
  misc_feature (3006)..(3006): n is a, c, g, or t
  misc_feature (3049)..(3049): n is a, c, g, or t
  misc_feature (3125)..(3125): n is a, c, g, or t
  misc_feature (3200)..(3200): n is a, c, g, or t
  misc_feature (3220)..(3220): n is a, c, g, or t
  misc_feature (3234)..(3234): n is a, c, g, or t
  misc_feature (3249)..(3249): n is a, c, g, or t
  misc_feature (3252)..(3253): n is a, c, g, or t
  misc_feature (3258)..(3258): n is a, c, g, or t
  misc_feature (3418)..(3418): n is a, c, g, or t
  misc_feature (3420)..(3420): n is a, c, g, or t
  misc_feature (3628)..(3628): n is a, c, g, or t
  misc_feature (4176)..(4176): n is a, c, g, or t
  misc_feature (4209)..(4209): n is a, c, g, or t
  misc_feature (4225)..(4225): n is a, c, g, or t
  misc_feature (4230)..(4230): n is a, c, g, or t
  misc_feature (4243)..(4243): n is a, c, g, or t
  misc_feature (4261)..(4261): n is a, c, g, or t
  misc_feature (4287)..(4287): n is a, c, g, or t
  misc_feature (4375)..(4375): n is a, c, g, or t
  misc_feature (4411)..(4411): n is a, c, g, or t
  misc_feature (4655)..(4656): n is a, c, g, or t
  misc_feature (4659)..(4661): n is a, c, g, or t
  misc_feature (5310)..(5315): n is a, c, g, or t
  misc_feature (5317)..(5319): n is a, c, g, or t
  misc_feature (5324)..(5325): n is a, c, g, or t
  misc_feature (5433)..(5433): n is a, c, g, or t
  misc_feature (5569)..(5569): n is a, c, g, or t
  misc_feature (6102)..(6102): n is a, c, g, or t
  misc_feature (6762)..(6762): n is a, c, g, or t
  misc_feature (6767)..(6768): n is a, c, g, or t
tttttttttttttttttcgctgacagatggatgcatgtctttatttaattcgttcattccaggttcatcccacatcttcacatctcaccctcccaccgtcaaaacaggtcccatgtaacaacagggggccaaaaacaacaggcttgccnacagtctccatcaccccctaccccacggaacactgtggggacaacggtaccttgcttgaaagccacaggtttcaaacacttttaggggcacaactctcttcaaactggaaaccacgagccactacgtagaacaggctgtcagggagtttcaacctgggcaacatttggggtacgtccctggagccccaagttccctcagagcaggtgaaaactnnngcttcagagcccttctttctatccaatcacttgaaacgttccatagaaagaagaaagaaaaaagaactcccttcttgaaatgcgaataccaagatttcgcacgaccaacacttccacctgttgaaataaacagtccacaaaattaaggcatttgggggcanttagagggaagtaaagcatttactaaagttacaatatcatatcaaaagtgttcattatgcttttgaaggctcttaactaggcacaagggcagaaacagtcacggtcccggccactgcaggcaaacacgtgttgattaccaaagcagaaagggaaacagagagctggtggtgagcattctcttcagcaggtccccaggcaccaggcccccctccaagtcatgcctcacatgcccaacagcaaagagaagcagtgggagctgagcagacactgcagggcagggcagggcactgctggctaaattacagcagcaactgtacacacgaaacagcttcttcataaacaccattctcaaactggatttatgcacattcatacactacctagtatatctaagagatcttgaaatcaaagcaacataaaaaagagagactcgcctgcaatccaggcactgagcaacgacatgtcaaggcaacagaaatccccctcctgcccccactcacttctccatcccactgtctgctgagaatttctagtatntatnccacacatcactgtacacttcaaaatctgcacattcctctccgtggaattctcctgggatgtgaatcccacccacgtgcatcatgtacacatctaaactgtttcattccacactgagaggttcgggtttggagcgttcattccacactgangaggttcgggtttggagcgggaggaggggagtgaggcataagtgagaaaggaggtcacatggcccaaacaggtacttccaggaggccaatcccagccggtagggatccaggccccgggagnccaggcctgcttgccgagtaccgacggccaggtgaggaggcagaagctgtagccccagagccagaagacccacactagtgtcatcaccaacatacaggggggccacaggctcccagtgcccaggttaaggtgcagtcctcaccgagaaggccacatcagcttcctgtgagtgtgtcccatggatccaggggtggccagaggcccatcaccacgggtgttggcacttcctaaaaccgcacgcagcgatctccagactcgttcttggccatgagcagcagaaatgctgcagtgctgcctgccagcgtacaggctgttcaagaacccaagaggaatttctcaccaatacgtaaacatgcaccacagctagactgcggttccgtgactttgggatttcagagacaggcgaacttaagaagaaattctggggctgacaancagcaaccaacattttgttttgcaaccaagagcatttcaaaaagcaaaantattgccctctacttttaccttcattacataaaaggaaattttatcatccaaataaggaagaaaataacttcagaataaagaacaatcctttaagttgaacaaatgtgacttcatcaattatttaccatgctgttctcatacgcctcacctgcatagagcgctctgtccccagtgctatgctgtgggccacaaggactctggcccatcggggtccacagtccagcccggatctcccagggtcacacgttcatccagccctgtcaccatctcaaatgcatttccactaagaagagggacaagtcaccaggacagcagtttacacacacatggagactgcttgcgtaacacattgcttcccatgtgaccccacnaaaccctgccagaaaggcacagcaggaagccttgtccctgtctgaagtggagctgcctctgttaatagggatgtggccaaggccgcacggatggcagcaangcacaggccaagcgtctctctcaggcagactcttccttggctcagtcctatgtctgctgtatcttcctctccttctctcangaacttttaatttgaagaatcnattcattgaaaaaggaaaaagaaaacttactanaaacnnntgttccttcnctnnnnnnntacctgtttaacaagtacnttttaacaatgtactaaattttcaaatgtcaaaagaaaacaccaaaaaacaagcgttgttgccttaaacacttttctggaacaaggcagaatataaataaataaataaataacacgagtgatgcaaagagtcacagaatgtgggtgatattgatgggtttatctaaaacccctcacccgggactccaaagctgaattctcagagttaccaacgttgtcccccaccccaccacagcccagcccagcccatctgttgacagcagccaaggcccagggcccaggactgttccacagccactggcagtggtgacagtcagatgcttctgggatgcaaccaggggcaaccttcaggctccttcccccagcccatcgagcccctctcctagggaggactccgggccagccaggcagcagcctcactgaggaccacgtttccctgtcccatgggacttgggcgccccagggcttagaaaggtgatttcctaaantnnnnnnnngnannnnncnnctctncctnntctgtaaccngtccttgccaacagaaaaaaaagggagctttagtgaaggaagncaatgccactaaaacccaggaggaatgaccttagctacccaccctgttttcagattcatatttggcagctatgaancaagataccaaacctccaaattgtttggattctgaaaaaattggcaaaggctggcttgaacagagaggaagttgnacatgtcctctgcaaatganaaagctgagacccntagacacctgcaggncannccagnctgggccacaggccagggaagggccatgagaggccccctcctccagctcattctctccccagatacatcattccctggccaggtctgggtgagtcttctctgcaacgatccattcagtccactcctcctagagagaccaggggcagtgacctggtccctncnaaacaggccctgggctgtgcaaaggagcatgacgcccatgctgccacatctgggtccttgcctctgtgcagcctgaaggtcacaccaccacactcacgcatgggactcccacgaggcagcattcccaggtgctgcttcccaaaaggttcaataactgagccacctcctgcaccgggcagggctggggaggcctcgtccttaacaggcncctgcagaaagtactcagtagagcagacgcagagcgtatcatgtgtctacaacatggctcacctcgaaaaaaagccaccctcctctgagcccaaagggtggcaggaagaagagcctcgaggtgggaggagctaaacagtaagccagtaaagagccagagtgcagggagctaaccagcctccctgaaagcccctatcagccctaccagggtgatgagccactgcctacgacctccagtgacaaggcccagtccacggtggtggctccaacttccctatcatcattccttaactccctatagctcctgccccagccacagcccaatttttgtcctagtcccactttggtaccacaaagaacacgcccaccccctctcccgggctgaagcccctgcagcacccagccccggctgtcctggccctccccagccgctcaccacctgcggttcctctcctatcttgggaagaccctcctggcttcagcaggacccaatcccaagctcccctcgggaacagcacacagcccacatttacacaaccatcacagctntctaacagtgtcacctcagctgaggaaacaccntcccggattgcatttntcccnctctgaatcaccncgaggactgttcttcccnttcggaactgcatctgcacatacacngggtcagctggggtgacccacacagagcccatttgtgacacaaggggttgggggtatagaattctatcctctggctgtagaacgcaantaatggccagacactgcctgcctgctaagacacacngtgatgctactaagtaaataaaacggtatcattgttcaagttttacaaattggatttctcttattacagaaaatcaaacacagatttgaaatctgcgccttcctaaatatatctgaagtctagaatcaccatggatccacacaatggtcctcatgggcttcaaatgacgaaatgtgattcactggaaacagcagcaacctgggagggctctgaggctgcagccaccagcccacctgccggtgannctnnnacctggctgtgcagccctgggtaaggggaagcccaactcatgcagccaaagctatcagcaatgataacccaggccatctctctcccgggaaagacttctgacctcactgctatcccctgcatagattctagaagcagcgaccaagacaaaagagagcaatcaaccaaccgccagatgttctgtccactggacagcatgcgcctggaggctcataaccacccagaggactccctgcatttttcactttctggtacgtgtgggggacagaagacagcgcctcgggcattttcctcgcctattagaactggcagtgaatgctgttggaacggtccttggtcccaaggaaggcagtcatttcctggggagtttggtgtgggcctcctaaaatcaatcactggaagctccctaaggtgaagtggcagaaaaatcgtgacacctgatgagaggcacagtaggtgttggaacaggtgccgtgcagccaggaaaccacccttgagtgaagacactcactatgagacctccatcgcaaagagagaatactgaaggggcaaggaaggggcgtgtatgacaagcgcatgtgttaccccaggagcaggaaaaaccaaccagcaagttcatgaactgcatttctgtcctctattttgcttannnnnntnnnttttnnttgagatactagaaggctttaatcgaaccatcaaattgagaagtagaaaaataaagagaagcacagttccagaagtgctgggagtcttccctacagggaaattagtangcctccaacctcagcccctacatgtacataccccatggcccgttacattaatatgcaactgaaaatccagaacagagaacttgggaaaaacaataataactttagtataagcctctcagctgacaatgacccaagnactgttcagcggcccaggcacctgaggagcaatgacagtctacgaggacatcttctgcagcaacagccatcaggagaccagcagcagcacagcactcagggctcggtgtccacctccctgcagatcactttctccctcactggaatcaaccgcagcacttggagtctactcatggagtagaaacttctttatggggtctggcagaggcagcgaaggaatcagatgaagccggtgtttgccaagagctcttctcacagccacacggcacagacacagcaaggttctgggaacacttctggcctctttaaagacctgcaaggcctcagggtccacttttcttcttcctctcgactctgggcccagcgattcccacttcactagattcaggttggctccaaattctaccagcaggctcacgaaggctgcctcacagccgtggcgcagaacagcatccatgacgcacccaggggagcccctgtagaatccctgtgtgttgacaggaccattgcagttgaagtcagggttcgcgccanccaggaggagcagccggaagcactggaggttgtggtaggctgcgctgatgtacaaggggcagaccaccaaggaggtgagccgccgggagaatcgaggctggacatcaggagtcaggtggtggttgacgtcaacatcagccccgtacctgatgagggccttcaggatgtctgcccggcccacgcgagaggcgtggtagacaggggtgctgcgatggtgccggcttccgttggggtccgcgccagcttcgagaaggatctgggtactctctaggtgcccgttcaccacagccacatacagggccgtctgtccttttacgtccaccagatccacctcggcccccttccggatgaggaagtccacacagctcccatggcctgcagtggccgcgattcgcaacggtgtgcaggggagccagccacagcaccagacagacttctcgttgatgcggctccggtagctctcctcttgcaataggctcctgagggtctggaggtccccgacgtaagctgcatcatggagcctcgtgtcctcacagtgctccagcggatgatcacaaaattgctccctcagccactccttcagattacgacctgcggagcccggccctgcccgcccgtctgggctgccgccctccgccatggatgcttccgcctccgcgnccgcnnctgacccgcgcacgcccctcgggcaggaagcagaacgacccgcgaccacttccggcgccgcctcggccgatt

SEQ ID NO: 202 - DNA, 6586 bp, Homo sapiens
ctggggagccggcgctggaggtggtgagtggcgtggggactgtgtcgagggggtccccaaggtgccggaccctgcggaggggcgaagtttcggcactggggagggcgtgcggacgctttccctacaggcgaccactgctctgcgggcgggtggtcttagctccagtcccccattcagttcctcagcattccaggtcggcggcgaaggggtccccgaacgaagggcgcaaggcagcgtctctgctgggaccgggaagccggacttcagggcctctcggcccgtgggcttctccccgagtctccccgagtcggttggcattaagagtttagcagatactttcagaaatggatacataagaaatggctggaaatcaaatgaatgtccaaagaagagcttagggtcttagtaacattcttttttaaaataactgtctgccaaaatgtcattacacagtactcataatagaaataacagcggtgatattcttgatattccttcttcccaaaatagttcatcactgaatgccctcacccacagtagccgacttaagctgcatttgaagtcggatatgtcagaatgtgaaaatgatgatccattattgagatctgcaggtaaagtcagagacataaatagaacttatgttatttctgccagtagaaaaacagcagacatgccccttacccctaatcctgtaggtagattggcacttcagaggagaactacaaggaacaaagaatcatctttgcttgttagtgagttggaagacacaactgaaaaaacagcagaaacacgtcttacattacaacgtcgtgctaaaacagattctgcagaaaagtggaaaacagctgaaatagattctgtcaaaatgacactgaatgtgggaggtgaaacagaaaataatggtgtttctaaggaaagtagaacaaatgtaaggattgtaaataatgctaaaaactcttttgttgcctcttctgtacctttagatgaagatccacaggtcattgaaatgatggctgataagaaatacaaagaaacattttctgcccccagtagagcaaatgaaaatgttgcacttaagtactcaagtaatagaccacccattgcttccctgagtcagactgaagttgttagatcaggacacttgacaacgaaacctactcagagcaagttggatatcaaagtgttgggaacaggaaacttgtatcatagaagtattgggaaggaaattgcaaaaacttcaaataaatttgggagcttagaaaaaagaacacctacaaaatgtacaacagaacacaaactgacaacaaagtgcagcctgcctcagcttaagagcccagctccatcaatactgaagaatagaatgtctaaccttcaagttaaacaaagaccaaaaagttcctttcttgcaaataaacaggaaagatccgcagaaaatacaattcttcccgaagaagaaactgtagttcagaacacctctgcaggaaaagaccccttaaaagtagagaatagtcaagtgacagtggcagtacgcgtaagacctttcaccaagagagagaagattgaaaaagcatcccaggtagtcttcatgagtgggaaagaaataactgtggaacaccctgacacgaaacaagtttataattttatttatgatgtttcattctggtcttttgatgaatgtcatcctcactacgctagccagacaactgtctatgagaagctagcagcaccactcctagaaagagccttcgaaggcttcaatacctgtctttttgcttatggtcagactggctctggaaaatcatatacgatgatgggatttagtgaagaaccaggaataattccaagattttgtgaagatcttttttctcaagtagccagaaaacaaacccaagaggtcagctatcacattgaaatgagcttctttgaagtatataatgaaaaaattcacgaccttctggtttgtaaagatgaaaatgggcagagaaagcaaccactgagagtgagggaacatcctgtttatggaccatatgttgaagcactgtcaatgaacattgtcagttcttacgctgatatccagagttggctagaattgggaaataaacaaagagctactgctgctactggtatgaatgataaaagttcccgatctcattcagttttcaccctggtgatgacccagaccaagacagaatttgtggaaggggaagaacacgatcacagaataacaagtcgaattaacctaatagatctggcaggcagtgagcgctgctctacggctcacactaatggagatcgactaaaggaaggtgtgagtattaataagtccttgctaactttgggaaaagttatatctgcactttcggaacaagcaaaccaaaggagtgtttttattccttatcgtgaatctgttcttacatggctgttaaaagaaagtctgggtggaaattcaaaaactgcaatgattgctacgattagtcccgctgccagcaacatagaagaaacattaagcacacttagatatgctaaccaagcccgtttaatagtcaacattgctaaagtaaatgaagatatgaacgctaagttaattagagaattgaaggcagaaattgcaaagctaaaagctgctcagagaaacagtcggaatattgaccctgaacgatacaggctctgtcggcaagaaataacatccttaagaatgaaactgcatcaacaggagagagacatggcagaaatgcaaagagtgtggaaagaaaagtttgaacaagctgaaaaaagaaaacttcaagaaacaaaagagttacagaaagcaggaattatgtttcaaatggacaatcatttaccaaaccttgttaatctgaatgaagatccacaactatctgagatgctgctatatatgataaaagaaggaacaactacagttggaaagtataaaccaaactcaagccatgatattcagttatctggggtgctgattgctgatgatcattgtactatcaaaaattttggtgggacagtgagtattatcccagttggggaagcaaagacatatgtaaatggaaaacatattttggaaatcacagtattacgtcatggtgatcgagtgattcttggtggagatcattattttagatttaatcatccagtagaagtccagaaaggaaaaaggccatctggaagagatactcctataagtgagggtccaaaagactttgaatttgcaaaaaatgagttgctcatggcacagagatcacaacttgaagcagaaataaaagaggctcagttgaaggcaaaggaagaaatgatgcaaggaatccagattgcaaaagaaatggctcagcaagagctttcttctcaaaaagctgcatatgaaagcaaaataaaagcactggaagcagaactgagagaagagtctcaaaggaaaaaaatgcaggaaataaataaccagaaggctaatcacaaaattgaggaattagaaaaggcaaagcagcatcttgaacaggaaatatatgtcaacaaaaagcgattagaaatggagacattggctacaaaacaggctttagaagaccatagcatccgccatgcaagaattctggaagctttagaaactgaaaagcaaaaaattgctaaagaagtacaaattctacagcagaatcggaataatagggataaaacttttacagtgcagacaacttggagctctatgaaactctcaatgatgattcaggaagccaatgctatcagcagcaaattgaaaacatactatgtttttggcagacatgatatatcagataaaagtagttctgacacttctattcgggttcgtaacctgaaactaggaatctcaacattctggagtctggaaaagtttgaatctaaacttgcagcaatgaaagaactttatgagagtaatggtagtaacaggggtgaagatgccttttgtgatcctgaagatgaatgggaacccgacattacagatgcaccagtttcttcactttctagaaggaggagtaggagtttgatgaagaacagaagaatttctggttgtttacatgacatacaagtccatccaattaagaatttgcattcttcacattcatcaggtttaatggacaaatcaagcactatttactcaaattcagcagagtcctttcttcctggaatttgcaaagaattgattggttcttcgttagatttttttggacagagttatgatgaagaaagaactatagcagacagcctaattaatagttttcttaaaatttataatgggctatttgccatttccaaggctcatgaagaacaagatgaagaaagtcaagataacttgttttcttctgatcgagcaatccagtcacttactattcagactgcatgtgcttttgagcagctagtagtgctaatgaaacactggctgagtgatttactgccttgtaccaacatagcaagacttgaggatgagttgagacaagaagttaaaaaactgggaggctacttacagttatttttgcagggatgctgtttggatatttcatcaatgataaaagaggctcaaaagaatgcaatccaaattgtacaacaagctgtaaagtatgtggggcagttagcagttctgaaagggagcaagctacattttctagaaaacggtaacaataaagctgccagtgtccaggaggaattcatggatgctgtttgtgatggtgtaggcttaggaatgaagattttattagattctggactggaaaaagcaaaagaacttcagcatgaactctttaggcagtgtacaaaaaatgaggttaccaaagaaatgaaaactaatgccatgggattgattagatctcttgaaaacatctttgctgaatcgaaaattaaaagtttcagaaggcaagtacaagaagaaaactttgaataccaagatttcaagaggatggttaatcgtgctccagaattcttaaagttaaaacattgcttagagaaagctattgaaattattatttctgcactgaaaggatgccatagtgatataaatcttctccagacttgtgttgaaagtattcgcaacttggccagtgatttttacagtgacttcagtgtgccttctacttctgttggcagctatgagagtagagtaactcacattgtccaccaggaactagaatctctagctaagtctctcctcttttgttttgaatctgaagaaagccctgatttgttgaaaccctgggaaacttataatcaaaataccaaagaagaacaccaacaatctaaatcaagcgggattgacggcagtaagaataaaggtgtaccaaagcgtgtctatgagctccatggctcatccccagcagtgagctcagaggaatgcacacccagtaggattcagtgggtgtgaatactgatgtgtaggcacttttatgaccacccatgaaagaaaaagaacacttgctcggtaattttctttatgcaggagagtttaagagaaatcagcacagatatttcaaaaaagtccatgtctttttatctttaaaatatctatttatcaaaggccagacacagtggctcacgcctgtaatcccagcactttgggaggcgggcagatcacaaggtcaggagtttgagaccggcctggccaacatggtgaaaccccgtctctactaaaaatacaaaaatttgctgggcatggtggcgcgtgcctgtaatcccagctactaggggggctgaggcaggaggatcgcttgaacctgagaggcagaggttgcagtgagccaagatcatgccactttactccagtctgagcaacagaacgagacttagtcaaaataaataaataaataagtaaataaataaataaataaaatatcttttatctttaaagtgtttaacattggtatactgtctgtagttggttcattagtcgtttataaagggttattttctcatgagtggaaacctgaacaatcagttacctttgtgcctatgccttctctctcctcagacagctgggatgtttatggtgaaatggcctgtacaagtttaactaagacaacttaacttgcattgttaatcaaaaattcttttctcaaagggttaactggttgccattttgaatagtatgttcaagggtgtagcttcctgtttctttccaaattataagtagctacctaaatatagtataattatatattaataatatggcttgctggcacagtagtttaccctgttatctgtgtttcataatgggggctgtatgaatattatttaaaactaataaaatgttgccagaattatactaaactgttggatgagattaggagatcagaggctggaccttctcttgataatgcttgttttgttaaaggtataatgaaataatttgtatatgatttgatgaagattaaagacccttattttccacagctttaaaaaaaaacctttatttatgatcaagtaataaagataatattctacttgtgggatcttacattatggaaatagtttgacgtttttgacctcaagagtatgtataatttgaagagatactttgtaactatgcttgggtgatattgagcagttcctaaagaataattcattt

SEQ ID NO: 203 - DNA, 2249 bp, Homo sapiens
  misc_feature (1552)..(1552): n is a, c, g, or t
  misc_feature (1573)..(1573): n is a, c, g, or t
  misc_feature (1576)..(1576): n is a, c, g, or t
  misc_feature (1801)..(1801): n is a, c, g, or t
gtctacttatcaataagcagctgcctgtgcagagtgcaggctgcacctttggacagcctttaaaactgaattctcagaattttagaacaaatttttgtctagaaatgctgactttggttcattaggtagtggtaaaacaggctcccttcgaagctctccttcatcaccttcctaagtgcatgtacagggaagctctccttcatcaccttcctaagtgcatgggggaaaatacctagggctcaacagtcttgagaagtgtggaaacattttctttgtgagtgagaacagatcacctagagaaaggaaaccagattcccatcactgcttctgggtatcagatgctagcgctgcactccattttgcaatggcctcccttgctgcagcaaatgcagagttttgcttcaacctgttcagagagatggatgacaatcaaggaaatggaaatgtgttcttttcctctctgagcctcttcgctgccctggccctggtccgcttgggcgctcaagatgactccctctctcagattgataagttgcttcatgttaacactgcctcaggatatggaaactcttctaatagtcagtcagggctccagtctcaactgaaaagagttttttctgatataaatgcatcccacaaggattatgatctcagcattgtgaatgggctttttgctgaaaaagtgtatggctttcataaggactacattgagtgtgccgaaaaattatacgatgccaaagtggagcgagttgactttacgaatcatttagaagacactagacgtaatattaataagtgggttgaaaatgaaacacatggcaaaatcaagaacgtgattggtgaaggtggcataagctcatctgctgtaatggtgctggtgaatgctgtgtacttcaaaggcaagtggcaatcagccttcaccaagagcgaaaccataaattgccatttcaaatctcccaagtgctctgggaaggcagtcgccatgatgcatcaggaacggaagttcaatttgtctgttattgaggacccatcaatgaagattcttgagctcagatacaatggtggcataaacatgtacgttctgctgcctgagaatgacctctctgaaattgaaaacaaactgacctttcagaatctaatggaatggaccaatccaaggcgaatgacctctaagtatgttgaggtattttttcctcagttcaagatagagaagaattatgaaatgaaacaatatttgagagccctagggctgaaagatatctttgatgaatccaaagcagatctctctgggattgcttcggggggtcgtctgtatatatcaaggatgatgcacaaatcttacatagaggtcactgaggagggcaccgaggctactgctgccacaggaagtaatattgtagaaaagcaactccctcagtccacgctgtttagagctgaccacccattcctatttgttatcaggaaggatgacatcatcttattcagtggcaaagtttcttgcccttgaaaatccaattggtttctgttatagcagtccccacaacatcaaagnaccaccacaagtcaatagatntgngtttaattggaaaaatgtggtgtttcctttgagtttatttcttcctaacattggtcagcagatgacactggtgacttgacccttcctagacacctggttgattgtcctgatccctgctcttagcattctaccaccatgtgtctcacccatttctaatttcattgtctttcttcccacgctcatttctatcattctcccccatgacccgtctggaaattatggagngtgctcaactggtaaggagaacgtagaagtagccctagggatcctttttgaaactctacagttatcgcagatattctagcttcattgtaagcaatctaggaaataagccctgctgctttctagaaataagtgtgaaggataaattttctttgttgacctatgaagattttagagtttaccttcatatgtttgattttaaatcagtgtataatctagatggtaaaaaatgtgaaattgggattagggacctaccaaaatatttcattaatgctttcaattgacaaattttggcctttctttgataagacaatatgtacatgttttttcaaatattaaagatcttttaactgttggcagttgttatctacagaatcatatttcatatgctgtgtagtttataagtttttcctctatttatcagaataaagaaatacaacatacctgtaaa

SEQ ID NO: 204 - DNA, 2306 bp, Homo sapiens
actgactccgaacaggattctttcacccaggcatctcctccagagggatccgccagcccgtccagcagcaccatgtgggtgaccaaactcctgccagccctgctgctgcagcatgtcctcctgcatctcctcctgctccccatcgccatcccctatgcagagggacaaaggaaaagaagaaatacaattcatgaattcaaaaaatcagcaaagactaccctaatcaaaatagatccagcactgaagataaaaaccaaaaaagtgaatactgcagaccaatgtgctaatagatgtactaggaataaaggacttccattcacttgcaaggcttttgtttttgataaagcaagaaaacaatgcctctggttccccttcaatagcatgtcaagtggagtgaaaaaagaatttggccatgaatttgacctctatgaaaacaaagactacattagaaactgcatcattggtaaaggacgcagctacaagggaacagtatctatcactaagagtggcatcaaatgtcagccctggagttccatgataccacacgaacacagctttttgccttcgagctatcggggtaaagacctacaggaaaactactgtcgaaatcctcgaggggaagaagggggaccctggtgtttcacaagcaatccagaggtacgctacgaagtctgtgacattcctcagtgttcagaagttgaatgcatgacctgcaatggggagagttatcgaggtctcatggatcatacagaatcaggcaagatttgtcagcgctgggatcatcagacaccacaccggcacaaattcttgcctgaaagatatcccgacaagggctttgatgataattattgccgcaatcccgatggccagccgaggccatggtgctatactcttgaccctcacacccgctgggagtactgtgcaattaaaacatgcgctgacaatactatgaatgacactgatgttcctttggaaacaactgaatgcatccaaggtcaaggagaaggctacaggggcactgtcaataccatttggaatggaattccatgtcagcgttgggattctcagtatcctcacgagcatgacatgactcctgaaaatttcaagtgcaaggacctacgagaaaattactgccgaaatccagatgggtctgaatcaccctggtgttttaccactgatccaaacatccgagttggctactgctcccaaattccaaactgtgatatgtcacatggacaagattgttatcgtgggaatggcaaaaattatatgggcaacttatcccaaacaagatctggactaacatgttcaatgtgggacaagaacatggaagacttacatcgtcatatcttctgggaaccagatgcaagtaagctgaatgagaattactgccgaaatccagatgatgatgctcatggaccctggtgctacacgggaaatccactcattccttgggattattgccctatttctcgttgtgaaggtgataccacacctacaatagtcaatttagaccatcccgtaatatcttgtgccaaaacgaaacaattgcgagttgtaaatgggattccaacacgaacaaacataggatggatggttagtttgagatacagaaataaacatatctgcggaggatcattgataaaggagagttgggttcttactgcacgacagtgtttcccttctcgagacttgaaagattatgaagcttggcttggaattcatgatgtccacggaagaggagatgagaaatgcaaacaggttctcaatgtttcccagctggtatatggccctgaaggatcagatctggttttaatgaagcttgccaggcctgctgtcctggatgattttgttagtacgattgatttacctaattatggatgcacaattcctgaaaagaccagttgcagtgtttatggctggggctacactggattgatcaactatgatggcctattacgagtggcacatctctatataatgggaaatgagaaatgcagccagcatcatcgagggaaggtgactctgaatgagtctgaaatatgtgctggggctgaaaagattggatcaggaccatgtgagggggattatggtggcccacttgtttgtgagcaacataaaatgagaatggttcttggtgtcattgttcctggtcgtggatgtgccattccaaatcgtcctggtatttttgtccgagtagcatattatgcaaaatggatacacaaaattattttaacatataaggtaccacagtcatagctgaagtaagtgtgtctgaagcacccaccaatacaactgtcttttac

SEQ ID NO: 205 - DNA, 4608 bp, Homo sapiens
gaagaactttccagtttaggtccccgtcactgtctccacgccgtgatggcagcgctgccgaggacataggaaccacgactggaaagataatttatcgtgttaggagaagaacgatgatacctacttaacacctcagcatctgcgtcgtgtctctttgtgcttttgtttgtggaaggagacccaaatgcctttactttattctctggggagggccagcggctcgcatccccctcatctccagctgcagctcggatggtggattttcagtgccaacagacacatctgccgtgaactcgcagatgccagggagccctgtagtgacacgttctctgacagcaccttgccgcctgcccacgaccttgaccgtgaggagctgctatccgcaaccagcgccgacaccatgccccctcttcctggtgacaccctcaacaaccaggatttgctcgatctcagcccagcaggccaggcagacacaccccgctgtgccttaggaaggtgtgagaccggcttcccccatccccacagcaaaacacggcctgtcccaagccagtgaggagctaaagacacccaggtccccaaatgatcttactccatgccccacccgctcacaccgtcctttcccgtcacccttgctatcccctggagcactgccctccagagctgcccttcccaggaaggaatttggttggattctgtcactgtggagaccaagattttttaaaattcccaattacaaaagcagcatcacacttgcttctgagaacagcagggtgatgtctgttcccaagctggtggcgggagccttagcctgtgtggggccacccggggaagaggaggagaggagggtgaggaggcaggctcgccgttccaagggacagcataggctcgtggtggggcgtgttgcatctggtgtctgggacagtccccgtcaccccatgtgtgcggcctctgcactcccaagctccatggctgggctgggctgggctgggctgggctgggccgggcgtgcggagcctgtggagccagcagctgcagaggcctaggagggagttcctgggggaagcgcacagtgtccagtgcccatctcttgcttgtgtgtgagattagcccttgctggggcgtcaagaggaagagccttagacctgggcgggccttcaggggcatctagacccctgcacagcccaggcctggtgtctgcatttccacagcacccctgtggggactcctgccggggctggccgctgtctcaggagagacccaatggttagaaagcccctttttacacagctgacagcttctcccaaggcttccgtccacggggacaggcttaacccctgggcgccttttctgcagcatggcggccttctgagtcacctaagctgagcctgggtcattctctgtggcggtcagaaggccgatggccccaacacagtggcttgtgaaagggagagaggaggctctgcatgtccacctgctctatgggaggaggacacaggtgtccccagcccagcctgttctctcccagtcactcagggatggggccacccaaagtgcaggacccgccccaccctgcggttcgaagcctggcccctgtctccacttagcttctgtttctgcagtgggtggaagcgagtcagcggggggcctggcttgtgtacgtgttttccttatttggtctgtgggttgccaagtccatttttttttccactgaactggctggtaacttgatggactgtgtaactgacacaggccctctttagacccctgccttcaccccacccgcccgggtccactccctggggcgctgtcccaagccatccctgcttgccagctcaaagcttcaggtcctaggagccagtccacctcgaaagccctgagaaagtgagacacctgcacattcgctgggggagaccctccgttctcttgtggcagctgctcccacttgttaaaccaagctgtttctgcgggacgtgctcactcttgggaaccagtggcctagagctttgggttacaggcatggagagggctttcctgcctcaggcttggaggccaatgttccatacataaaccgccatgtcctctggtgcagctgggctgctcttttaaaagccagcatccatcttgaagctcgctgggtaaatggcaatgcattctcaagccagtgtcttcagctgatgcccagtgtccagtgctggtcaccagtcccctttgctgggtacagcctgcctggctgttctgtggtcctggaacgctgcagtgtggttttgttccatggagacagtaccaagcggagaggcctccttgcccacggccccagggcctgggggccaggggttctggccctgcggggacttaggcaggaggggaagagaagcccatggagccatgggaggggtgagctgtgggcggggcctagtcatgggaggggtgagctgtgggcggggcgagctgtgggtggggcctagccatgggagaggtgagctgtgaatggggctagctatgggtggggtgagctgtggacagggcctagccatgggaaaggtgagctgtgggcggggcctagtcacgggagaggtgagctgtgggcggggcctagtcatgggaggggtgagctgtggatggggcctagccatgggaggggtgagctgtgagtggggctgagccatgggagcagcaagctggtggagtgggctgggcggagctgtgggggctgctggcagggcctaggaaagtagacaactcccgggggagacgaagtagagagtgagtccccaagaaagggactcctgccccagcgtcaagtgccaaagcaggccccatctaccacttcagggtcgacgttggtggcaggtgttgttcacggtgtactgattgtcactgcaacacctccacatcaccttgaacttcaagaacagcagcaaagctgtatctgctatcagaggctgttaggtagtccagctttaaaataacacactctttctctatcccatgccctttaaacaagcagccacaggagatgtcagtctccagggcctggccccactgtgttgacagcagtcacgtctgttgagctgacactgctgaggctgaagctggccccgtgcaggtggctggtgagccacaggtgcagtacccggaggtgtgctctcccctagaggcctgtccccaactcctcccctagaggcctattcccgctgctcacagacctcagcagaggcaccagctggagggctccagggacatccttggagatacaggaggctttcctggcacagggcacagctcttaggaggcctttgtaggacgctgtctccccagcgtgtcctgctcatccaggatggggagaaagaggaggaggccccaggctcagaagccagggacagactgccgacgattaccaaactgaatccaggcagtgccatgaccctgggtgtcccttggttcacatcacccaccagacagctgcggagagagtgcagggaggggctgggaccaaacaggccagaaaccagcagaaaagaggcagaagtgaggtgggtgtgcctggggcacgaagccagcgccggggggatttcagtggagccttacagccaggctccgtgcggactgtgatgccagagaggcgtgcagcctctgggcaagtcgggagagggcttgggtggtccccacaaggcagaagaggtggaagggccagagaagaccaccaagaccaccgttcccgcaggcctggggtgagtgacctgactgagactagcgggcagagccaagcagggctaaactccaacccagggcccggtgttggacaaagtagctttttctttgctcgtttgtctgtgtattaagaagagactaaaatagccaaacgacgctggtcgcatgcgctggctgtggtctgtctgctgaatgtctatttttgtctcctgacgagacgtgaggaccatgcccttgatccctccgatggaccagaaacccccttccttgcaaaaaaaaaggcaattgaattaggaaaagatagcccaacctagctcagatccaccaagataagcacagcaaaagcttggctgcatttttgaggaataaaaacctgcagaaagcaccgataaccttcaagatctgaatgagattctattataacccgtctaaacgattgcaaaattcctcctttggttttggaagcagcgtttgctctcccgtggctcggattctctgaggaccagggagttgacacacaaaccccgccatgggtccgagccagctatttctcaaggctcccacctcgccaagctcccaagggcctgctggcagtgcctacgctgtgccaactaccctgtctggtacagaccacggctgggtaagcacccttaaaagcaacagaaatgacgtctggaagctgaaatgtgaaactgtcaagatggcttaggagaggaaggagtggacccgctggtctttggcattttgtatttagaattattctaactttatacataatgtataggccgatcttttggaagggataaggttttcattcttgtgcaactcattattctcattattggccttttaaataaaaagttgttttgcagtgtgaaaaaaaaaaaaaaaaaaaaa

SEQ ID NO: 206 - DNA, 1910 bp, Homo sapiens
ctcactgccacacgcagctcaacctgagctacacagccagatgcgagatgcttctctgctgatctgagtctgcctgcagcatggaccttggtcttccctgaagcatctccagggctggagggacgactgccatgcaccgagggctcatccatccgcagagcagggcagtgggaggagacgctatgacccccatcgtcacagtcctgatctgtctcaggctgagtctgggcccccggacccacgtgcaggcagggaccctccccaagcccacactctgggctgagccaggctctgtgatcacccaggggagtcccgtgaccctctggtgtcaggggatcctggagacccaggagtaccgtctgtatagagaaaagaaaacagcaccctggattacacggatcccacaggagattgtgaagaagggccagttccccatcccatccatcacctgggaacacacagggcggtatcgctgtttctacggtagccacactgcaggctggtcagagcccagtgaccccctggagctggtggtgacaggagcctacatcaaacccaccctctcagctctacccagccctgtggtgacctcaggagggaacgtgaccctccattgtgtctcacaggtggcatttggcagcttcattctgtgtaaggaaggagaagatgaacacccacaatgcctgaactcacagccccgtacccatgggtggtcccgggccatcttctctgtgggccccgtgagcccgagtcgcaggtggtcgtacaggtgctatgcttatgactcgaactctccccatgtgtggtctctacccagtgatctcctggagctcctggtcctaggtgtttctaagaagccatcactctcagtgcagccaggtcctatagtggcccctggggagagcctgaccctccagtgtgtttctgatgtcagctacgacagatttgttctgtataaggagggagaacgtgacttcctccagctccctggcccacagccccaggctgggctctcccaggccaacttcaccctgggccctgtgagccgctcctacgggggccagtacagatgctccggtgcatacaacctctcctccgagtggtcggcccccagcgaccccctggacatcctgatcgcaggacagttccgtggcagacccttcatctcggtgcatccgggccccacggtggcctcaggagagaacgtgaccctgctgtgtcagtcatgggggccgttccacactttccttctgaccaaggcgggagcagctgatgcccccctccgtctcagatcaatacacgaatatcctaagtaccaggctgaattccctatgagtcctgtgacctcagcccactcggggacctacaggtgctacggctcactcagctccaacccctacctgctgtctcaccccagtgactccctggagctcatggtctcaggagcagctgagaccctcagcccaccacaaaacaagtccgattccaaggctggagcagctaacaccctcagcccatcacaaaacaagactgcctcacacccccaggattacacagtggagaatctcatccgcatgggcatagctggcttggtcctggtggtcctcgggattctgctatttgaggctcagcacagccagagaagcctctgagatgcagccgggaggtgaacagcagagagaagaatgtacccttcagagtggtggagccttgggaacagatctgatgatgccaggaggttccgggagacaatttagggctgatgttatctggactgtctgccaatcatttttagagggaggaatcagtgttggattgcagagacattttctggagtgatccatgaaggaccattaacatgtgatacctttcctctctattaatgttgacttcccttggttggatcctct

SEQ ID NO: 207 - DNA, 998 bp, Homo sapiens
gcggaagtgtcggccgctccttggtgtgtgttaactcaggaagataaaagacgacataaaacaacagccaggactcagcatggacatgaggacccctgctcagtttcttggaatcttgttgctctggtttccaggtatgaaatgtgacatcaagatgacccagtctccatcttccatgtatgcatctctaggagagagagtcactatcacttgcaaggcgagtcaggacattaatagctatttaagctggttccagcagaaaccagggaaatctcctaagaccctgatctaccgtgcaaacagattggtagatggggtcccatcaaggttcagtggcagtggatctgggcaagattattctctcaccatcagcagcctggagtatgaagatatgggaatttattattgtctacagtatgatgagtttcctcggacgttcggtggaggcaccaagctggaaatcaaacgggctgatgctgcaccaactgtatccatcttcccaccatccagtgagcagttaacatctggaggtgcctcagtcgtgtgcttcttgaacaacttctaccccaaagacatcaatgtcaagtggaagattgatggcagtgaacgacaaaatggcgtcctgaacagttggactgatcaggacagcaaagacagcacctacagcatgagcagcaccctcacgttgaccaaggacgagtatgaacgacataacagctatacctgtgaggccactcacaagacatcaccttcacccattgtcaagagcttcaacaggaatgagtgttagagacaaaggtcctgagacgccaccaccagctccccagctccaccctatcttcccttctaaggtcttggaggcttccccacaagcgacctaccactgttgcggtgctccaaacctcctccccacctccttctcctcctcctccctttccttggcttttatcatgctaatatttgcagaaaatattcaataaagtcagtctttgcacttg

SEQ ID NO: 208 - DNA, 2316 bp, Homo sapiens
caggcggcgaggcggccgtcgagggcgcgggcggcggggacgcggcgctgggcgagccggggctgagcttcacgaccaccgacctgagcctggtggagatgacggaggtggagtacacgcagctgcagcacatcctctgctcgcacatggaggcggcggctgacggcgagctcgagatgcgcctcaactcggcgctgctggcggcggcgggcccgggcgcaggcgcgggcggcttcgcggcgggcggtcaggggggcgcggcgcccgtgtaccccgtgctgtgcccgtccgcgctggcggccgacgcgccctgcctgggccacatcgacttccaggagctgcgcatgatgctgctaagcgaggcgggcgcggcggagaagacgtcgggcggcggggacggagcgagggcccgggccgacggcgccgccaaggagggcgcgggcgcggctgcggctgcggctggacccgacggcgcgcccgaggcccgggccaagccggccgtgcgcgtccgcctggaggaccgcttcaacagcatccccgccgagccgccgcccgcgccgcgcggccccgagccccccgagccgggcggggcgctcaacaatttggtaactctcattcgacatccatctgaactaatgaatgttcctcttcagcaacaaaacaaatgtacagcattagtgaaaaataaaactgcggctacaactactgctttgcaatttacatacccactgtttactacaaatgcttgctctactagtggaaattctaatctttcacagacacagagttctagtaactcatgttctgtacttgaagctgccaagcaccaggatattggattgcctagagcattttctttctgttatcagcaagaaattgaatccactaaacagacgttaggtagtagaaacaaagttttgcctgagcaagtttggattaaagtgggagaagcagcgctatgcaaacaagcactgaagaggaatcggagtagaatgcgtcagttggacacaaatgtagagcgaagagcccttggagagattcagaatgtgggcgaaggtgccaccgccacacaaggcgcttggcagtcctcggagtcctcacaggcaaacctgggggagcaggcccagagtgggccccagggaggaaggtctcaacgtagggagaggcataaccgaatggaaagagatagaaggcgcagaatccgcatttgctgtgatgagttgaatctcttagtgccgttctgcaatgccgagactgacaaggccacaactctgcagtggaccacagcattcctgaaatacatccaggaaagacatggagattctcttaaaaaggaatttgagagcgtattttgcggtaaaactggccgaaggctaaagctgaccagaccggactccttggtgacctgtcctgcacaggggagtttacagagcagcccctcgatggagatcaagtgatcggactgaacaggaatcctcggggggtgaacagccattccttcgtgacctgtgcacgccttctgcaaccctggagctctgctcggctagtctgactcgaaaagggcgtgactcaagctgacgggactccagtagggactttgagagcacattttgtaaaaatatttatctagacgcaaatgcttatccatgaatgtcctcttagaccatttggggatgaagccatcttaataattagtaataattaattagtaataattagtaagcattttctcaatgctctgattccatcatgttttcttaacatgataacttaaaaaattgacatcctttgtactttctttaatcttaaaaagtacacggctttttacttatttaccttttaaatatgcccctttagcaattggaacaagttaaattgttaactaaaaacagtttggaaattttatttcattcgttatatcacacccccttgtcatgactctgagtcacgtgctgctgtattgcaacgtgcaggaccattttaaacctgtgtgctaaaaattttccagatacttgctttaaagctacttttgtccacaaatgaaatactgtcacagtagacgcttaaatgccacgttttcataccaagagtcattcattacttcatgtgtcacaaactgtggtgtttggaattgggtttttcaatgagtggctttacttatcaatcacaacaggtaatagcaatagacgttagtgcaatacaaagtcaccctcaataaatactgttaattggagatgtgagtttgtacacaaaacatcagactagacctttgtatgggagagaatttactgtacattaaattctttattttttgtt

SEQ ID NO: 209 - DNA, 798 bp, Homo sapiens
atgtctgtacctactgatggtgctgtaaccacctcacagattccagcttcggaacaagagaccctggatcttgatgctggtgtaagtgaacattcaggtgattggttggatcaggattcagtttcagatcagtttagtgtagaatttgaagttgaatctctcgactcagaagattatagccttagtgaagaaggacaagaactctcagatgaagatgatgaggactattggaaatgcacttcatgcaatgaaatgaatcccccccttccatcacattgcaacagatgttgggcccttcgtgagaattggcttcctgaagataaagggaaagataaaggggaaatctctgagaaagccaaactggaaaactcaacacaagctgaagagggctttgatgttcctgattgtaaaaaaactatagtgaatgattccagagagtcatgtgttgaggaaaatgatgataaaattacacaagcttcacaatcacaagaaagtgaagactattctcagccatcaacttctagtagcattatttatagcagccaagaagatgtgaaagagtttgaaagggaagaaacccaagacaaagaagagagtgtggaatctagtttgccccttaatgccattgaaccttgtgtgatttgtcaaggtcgacctaaaaatggttgcattgtccatggcaaaacaggacatcttatggcctgctttacatgtgcaaagaagctaaagaaaaggaataagccctgcccagtatgtagacaaccaattcaaatgattgtgctaacttatttcccctag

SEQ ID NO: 210 - DNA, 2020 bp, Homo sapiens
caaagactcacccgtgagccagctctcaaagaaagcagcttgcgttgacagcctgggggcagcaaggatgcagtctcccaggagaggatgcactcggtggtgggaagccaggctggaggggcctgagtgaccctctccacaggcgggcagggcagtgggagaggtggtgtgtggatacctctgtctcacgcccagggatcagcagcatgaaccagcttggggggctctttgtgaatggccggcccctgcctctggatacccggcagcagattgtgcggctagcagtcagtggaatgcggccctgtgacatctcacggatccttaaggtatctaatggctgtgtgagcaagatcctagggcgttactaccgcacaggtgtcttggagccaaagggcattgggggaagcaagccacggctggctacaccccctgtggtggctcgaattgcccagctgaagggtgagtgtccagccctctttgcctgggaaatccaacgccagctttgtgctgaagggctttgcacccaggacaagactcccagtgtctcctccatcaaccgagtcctgcgggcattacaggaggaccagggactaccgtgcacacggctcaggtcaccagctgttttggctccagctgtcctcactccccatagtggctctgagactccccggggtacccacccagggaccggccaccggaatcggactatcttctccccaagccaagcagaggcactggagaaagagttccagcgtgggcagtatcctgattcagtggcccgtggaaagctggctactgccacctctctgcctgaggacacggtgagggtctggttttccaacagaagagccaaatggcgtcggcaagagaagctcaagtgggaaatgcagctgccaggtgcttcccaggggctgactgtaccaagggttgccccaggaatcatctctgcacagcagtcccctggcagtgtgcccacagcagccctgcctgccctggaaccactgggtccctcctgctatcagctgtgctgggcaacagcaccagaaaggtgtctgagtgacaccccacctaaagcctgtctcaagccctgctggggccacttgcccccacagccgaattccctggactcaggactgctttgccttccttgcccttcctcccactgtcccctggccagtcttagtggctctcaggccctgctctggcctggctgcccactactgtatggcttggaatgaggcaggagtgggaaggagatggcatagagaagatctaataccatcctgcccattgtccttaccgtcctgcccatacagactgtggctccttcctccttcctgtgattgctccctcctgtgtggacgttgcctggccctgcctcgatgcctctctggcgcatcacctgattggaggggctggtaaagcaacacccacccacttctcacactggccttaagaggcctccactcagcagtaataaaagctgtttttattagcagtagttctgttgtccatcatgttttccctatgagcacccctatgcccactctaatattcaacaattatagacaatttgccctatcatttatttacatctatgtatctaccatctaatctatgcatgtatgtaggcaatacatgtatctaaacaatgtatttgtcaatgcatcaatttacctactctatgtatgcatctatatgtgtattatgtatgtatgtgtgcatgcgtgcgcgcacacacacacacacacattgatattatatcatggcattttattcctaaatcttccagcatgcatccccaaaaaacaagaaacttgtcttacataatcacaataatatatccacatctaagaaaatttactgtaacttcttaatctaagaaaattatgtatttttgtcatatgtattttgtcatatgtattttgtatttgcatatgtattttgtatttgcatatgtatttttgtcatagcagcaaacagagtgaaatgccatttttcatattcttaaaaaaaaaaa

SEQ ID NO: 211 - DNA, 1794 bp, Homo sapiens
  misc_feature (1782)..(1782): n is a, c, g, or t
  misc_feature (1788)..(1788): n is a, c, g, or t
caagaaaaccaactggaaaaaaaaatgaaattccttatcttcgcatttttcggtggtgttcaccttttatccctgtgctctgggaaagctatatgcaagaatggcatctctaagaggacttttgaagaaataaaagaagaaatagccagctgtggagatgttgctaaagcaatcatcaacctagctgtttatggtaaagcccagaacagatcctatgagcgattggcacttctggttgatactgttggacccagactgagtggctccaagaacctagaaaaagccatccaaattatgtaccaaaacctgcagcaagatgggctggagaaagttcacctggagccagtgagaataccccactgggagaggggagaagaatcagctgtgatgctggagccaagaattcataagatagccatcctgggtcttggcagcagcattgggactcctccagaaggcattacagcagaagttctggtggtgacctctttcgatgaactgcagagaagggcctcagaagcaagagggaagattgttgtttataaccaaccttacatcaactactcaaggacggtgcaataccgaacgcagggggcggtggaagctgccaaggtgggggctttggcatctctcattcgatccgtggcctccttctccatctacagtcctcacacaggtattcaggaataccaggatggcgtgcccaagattccaacagcctgtattacggtggaagatgcagaaatgatgtcaagaatggcttctcatgggatcaaaattgtcattcagctaaagatgggggcaaagacctacccagatactgattccttcaacactgtagcagagatcactgggagcaaatatccagaacaggttgtactggtcagtggacatctggacagctgggatgttgggcagggtgccatggatgatggcggtggagcctttatatcatgggaagcactctcacttattaaagatcttgggctgcgtccaaagaggactctgcggctggtgctctggactgcagaagaacaaggtggagttggtgccttccagtattatcagttacacaaggtaaatatttccaactacagtctggtgatggagtctgacgcaggaaccttcttacccactgggctgcaattcactggcagtgaaaaggccagggccatcatggaggaggttatgagcctgctgcagcccctcaatatcactcaggtcctgagccatggagaagggacagacatcaacttttggatccaagctggagtgcctggagccagtctacttgatgacttatacaagtatttcttcttccatcactcccacggagacaccatgactgtcatggatcccagcagatggatgttgctgctgctgtttgggctgttgtttcttatgttgttgcagacatggaagaaatgctgcctaggtcctagaaacagtaagaaagaaacgttttcatgcttctggccagggatcctgggtctgcaactttggaaaactcctcttcacataacaatttcatccaattcatcttcaaagcacaactctatttcatgctttctgttattatctttcttgatactttccaaattctctgattctagaaaaaggaatcattctcccctccctcccaccacatagaatcaacatatggtagggattacagtgggggcatttctttatatcacctcttaaaaacattgtttccactttaaaagtaaacacttaataaatttttggaagatctctgaaaaaaaaaaaaaaaaaaaaaanaaattncctgcg

SEQ ID NO: 212 - DNA, 1472 bp, Homo sapiens
gtcagagccgccctatcagattatcttaacaagaaaaccaactggaaaaaaaaatgaaattccttatcttcgcatttttcggtggtgttcaccttttatccctgtgctctgggaaagctatatgcaagaatggcatctctaagaggacttttgaagaaataaaagaagaaatagccagctgtggagatgttgctaaagcaatcatcaacctagctgtttatggtaaagcccagaacagatcctatgagcgattggcacttctggttgatactgttggacccagactgagtggctccaagaacctagaaaaagccatccaaattatgtaccaaaacctgcagcaagatgggctggagaaagttcacctggagccagtgagaataccccactgggagaggggagaagaatcagctgtgatgctggagccaagaattcataagatagccatcctgggtcttggcagcagcattgggactcctccagaaggcattacagcagaagttctggtggtgacctctttcgatgaactgcagagaagggcctcagaagcaagagggaagattgttgtttataaccaaccttacatcaactactcaaggacggtgcaataccgaacgcagggggcggtggaagctgccaaggttggggctttggcatctctcattcgatccgtggcctccttctccatctacagtcctcacacaggcattcaggaataccaggatggcgtgcccaagattccaacagcctgtattacggtggaagacgcagaaatgatgtcaagaatggcttctcatgggatcaaaattgtcattcagctaaagatgggggcaaagacctacccagatactgattccttcaacactgtagcagagatcactgggagcaaatatccagaacaggttgtactggtcagtggacatctggacagctgggatgttgggcagggtgccatggatgatggcggtggagcctttatatcatgggaagcactctcacttattaaagatcttgggctgcgtccaaagaggactctgcggctggtgctctggactgcagaagaacaaggtggagttggtgccttccagtattatcagttacacaaggtaaatatttccaactacagtctggtgatggagtctgacgcaggaaccttcttacccactgggctgcaattcactggcagtgaaaaggccagggccatcatggaggaggttatgagcctgctgcagcccctcaatatcactcaggtcctgagccatggagaagggacagacatcaacttttggatccaagctggagtgcctggagccagtctacttgatgacttatacaagtatttcttcttccatcactcccacggagacaccatgactgtcatggatccaaagcagatgaatgttgctgctgctgtttgggctgttgtttcttatgttgttgcagacatggaagaaatgctgcctaggtcctag

SEQ ID NO: 213 - DNA, 1524 bp, Homo sapiens
agcagacagaggactctcattaaggaaggtgtcctgtgccctgaccctacaagatgccaagagaagatgctcacttcatctatggttaccccaagaaggggcacggccactcttacaccacggctgaagaggccgctgggatcggcatcctgacagtgatcctgggagtcttactgctcatcggctgttggtattgtagaagacgaaatggatacagagccttgatggataaaagtcttcatgttggcactcaatgtgccttaacaagaagatgcccacaagaagggtttgatcatcgggacagcaaagtgtctcttcaagagaaaaactgtgaacctgtggttcccaatgctccacctgcttatgagaaactctctgcagaacagtcaccaccaccttattcaccttaagagccagcgagacacctgagacatgctgaaattatttctctcacacttttgcttgaatttaatacagacatctaatgttctcctttggaatggtgtaggaaaaatgcaagccatctctaataataagtcagtgttaaaattttagtaggtccgctagcagtactaatcatgtgaggaaatgatgagaaatattaaattgggaaaactccatcaataaatgttgcaatgcatgatactatctgtgccagaggtaatgttagtaaatccatggtgttattttctgagagacagaattcaagtgggtattctggggccatccaatttctctttacttgaaatttggctaataacaaactagtcaggttttcgaaccttgaccgacatgaactgtacacagaattgttccagtactatggagtgctcacaaaggatacttttacaggttaagacaaagggttgactggcctatttatctgatcaagaacatgtcagcaatgtctctttgtgctctaaaattctattatactacaataatatattgtaaagatcctatagctctttttttttgagatggagtttcgcttttgttgcccaggctggagtgcaatggcgcgatcttggctcaccataacctccgcctcccaggttcaagcaattctcctgccttagcctcctgagtagctgggattacaggcgtgcgccactatgcctgactaattttgtagttttagtagagacggggtttctccatgttggtcaggctggtctcaaactcctgacctcaggtgatctgcccgcctcagcctcccaaagtgctggaattacaggcgtgagccaccacgcctggctggatcctatatcttaggtaagacatataacgcagtctaattacatttcacttcaaggctcaatgctattctaactaatgacaagtattttctactaaaccagaaattggtagaaggatttaaataagtaaaagctactatgtactgccttagtgctgatgcctgtgtactgccttaaatgtacctatggcaatttagctctcttgggttcccaaatccctctcacaagaatgtgcagaagaaatcataaaggatcagagattctg

SEQ ID NO: 214 - DNA, 591 bp, Homo sapiens
ccgctgtcaagatgcttctggccatggtccttacctctgccctgctcctgtgctccgtggcaggccaggggtgtccaaccttggcggggatcctggacatcaacttcctcatcaacaagatgcaggaagatccagcttccaagtgccactgcagtgctaatgtgaccagttgtctctgtttgggcattccctctgacaactgcaccagaccatgcttcagtgagagactgtctcagatgaccaataccaccatgcaaacaagatacccactgattttcagtcgggtgaaaaaatcagttgaagtactaaagaacaacaagtgtccatatttttcctgtgaacagccatgcaaccaaaccacggcaggcaacgcgctgacatttctgaagagtcttctggaaattttccagaaagaaaagatgagagggatgagaggcaagatatgaagatgaaatattatttatcctatttattaaatttaaaaagctttctctttaagttgctacaatttaaaaatcaagtaagctactctaaatcagtatcagttgtgattatttgtttaacattgtatgtctttattttgaaataaat

SEQ ID NO: 215 - DNA, 861 bp, Homo sapiens
gccgggcgtgcagggccccgccgccgccatgtcgggctcgttcgagctctcggtgcaggatctcaacgacctgctctcggacggcagcggctgctacagcctcccgagccagccctgcaacgaggtcaccccgcggatctacgtgggcaacgcgtctgtggctcaggacatccccaagctgcagaaactaggcatcacccatgtgctgaacgcggctgagggcaggtccttcatgcacgtcaacaccaatgccaacttctacaaggactccggcatcacatacctgggcatcaaggccaacgacacacaggagttcaacctcagcgcttactttgaaagggctgccgacttcattgaccaggctttggctcaaaagaatggccgggtgctcgtccactgccgggaaggttatagccgctccccaacgctagttatcgcctacctcatgatgcggcagaagatggacgtcaagtctgccctgagcatcgtgaggcagaaccgtgagatcggccccaacgatggcttcctggcccagctctgccagctcaatgacagactagccaaggaggggaagttgaaaccctagggcacccccaccgcctctgctcgagaggtccgtgggggaggccgtgggaaaggtgtccgagctgccatgtttaggaaacacactgtaccctgctcccagcatcacaaggcacttgtctacaagtgtgtcccaacacagtcctgggccactttccccaccctggggagcacataaagaagcttgccaaggggggcgtccttgctccccagttgtcctgtttctgtaacttatgatgtcttttccctgagatgggggctcagagggggaaggcctgt

SEQ ID NO: 216 - DNA, 4784 bp, Homo sapiens
  misc_feature (52)..(52): n is a, c, g, or t
  misc_feature (70)..(70): n is a, c, g, or t
  misc_feature (239)..(239): n is a, c, g, or t
  misc_feature (340)..(340): n is a, c, g, or t
  misc_feature (348)..(348): n is a, c, g, or t
  misc_feature (562)..(562): n is a, c, g, or t
  misc_feature (623)..(623): n is a, c, g, or t
  misc_feature (634)..(634): n is a, c, g, or t
  misc_feature (636)..(636): n is a, c, g, or t
  misc_feature (643)..(643): n is a, c, g, or t
  misc_feature (910)..(910): n is a, c, g, or t
  misc_feature (1068)..(1068): n is a, c, g, or t
  misc_feature (1075)..(1075): n is a, c, g, or t
  misc_feature (1129)..(1129): n is a, c, g, or t
  misc_feature (1139)..(1139): n is a, c, g, or t
  misc_feature (1142)..(1142): n is a, c, g, or t
  misc_feature (1151)..(1151): n is a, c, g, or t
  misc_feature (1154)..(1154): n is a, c, g, or t
  misc_feature (1166)..(1166): n is a, c, g, or t
  misc_feature (1185)..(1185): n is a, c, g, or t
  misc_feature (1254)..(1254): n is a, c, g, or t
  misc_feature (1283)..(1283): n is a, c, g, or t
  misc_feature (1318)..(1318): n is a, c, g, or t
  misc_feature (1327)..(1327): n is a, c, g, or t
  misc_feature (1333)..(1333): n is a, c, g, or t
  misc_feature (1336)..(1338): n is a, c, g, or t
  misc_feature (1370)..(1370): n is a, c, g, or t
  misc_feature (4727)..(4727): n is a, c, g, or t
  misc_feature (4729)..(4729): n is a, c, g, or t
cagattaatccaggttcatcctttctgaatctaccaatggagcatgccaatncaaagcttaaagcagcancagtggaaaatgctgtattattggaaactaatactgtagaggagaaaaatgtagaaattaatttggaatccaaagagaatacacccccagtagtaatatcagcagatcaaatggtaaatgaggatagtcaggttcagataactccaaatcagaaaacccttagacggtnttcaaggcgacgttcagaagtagtagagtctaccactgaaagccaagataaggaaaatagtcatcaaaaaaaggaacgacgtaaggaagaagaaaaacctnttcagaangagtccattgcatataaaagatgatgtgttacctaaacaaaaactgattgctgaacaaactctacaggagaatttaattgagaaaggaagtaatttacatgagaagactcttggggaaactagtgctaatgcagaaactgaacaaaataaaaaaaaggcagaccctgagaacattaagtctgagggggatggtacccaggacattgtagataangtcctctgagaaactagtcagaggccgaacacggtatcaaactagaagagcatctcagggntttgctttccngncattganaaactcagaatctgatagttcggaggcaaaagaagaaggttctaggaagaagagatctggaaaatggaaaaacaaaagcaatgaaagtgttgacattcaagatcaagaagagaaagtggtgaaacaggaatgtataaaagctgaaaatcagtcacatgattataaagcaacttctgaagaagatgtaagcataaaatctccgatttgcgaaaaacaagatgaaagtaatactgtaatatgtcaggattctacagtaacttcagattngttgcaagttcctgatgatttaccaaatgtgtgtgaggaaaaaaatgaaactagcaaatatgcagaatattcctttacaagtctacctgtgccagaatcaaatctaaggactagaaatgccattaagagattacataagcgagactcttttgataatngtagttngggagaatcctcaaaaatagggatatcagatatttcttcgctttcagaaaaaancttttcaaancanttgaatgcnaanacaagagaagtnaggagggtgaggagatctnaaaggttgtgattgctgtggggaaaaatcacaacctcaggaaaagtcactcattgggttaaagaatacngaaaataatgacgtagagattagtgaaancaaaaaaggcagatgtgcaagcacctgtaagcccnatcagaaanttctcnagnnnatccatattctgaaggacaatttttagatgancatcatagtgtgaattttcatttgggtctcaaagaggataatgatactattaatgattcattaattgtttctgaaaccaaatcaaaagaaaacactatgcaagaatctcttccttctggaatagtaaactttagagaggaaatttgtgatatggattctagtgaagcaatgtctcttgaaagccaggagtcacctaatgaaaattttaaaactgttggcccgtgtttaggagactcgaaaaatgtttcacaggaatctttggagacaaaagaagaaaaaccagaagaaaccccaaaaatggaactgagtctagagaatgttactgttgaaggaaatgcatgtaaagtaacagaatccaatctagagaaagcaaaaactatggaattgaatgtaggaaatgaagctagctttcatggacaagagagaaccaaaactggtatttctgaagaagcagcaatagaagaaaataaaagaaatgatgactctgaagcagacacagctaaactgaatgccaaagaagtagcaactgaggaatttaattcagatattagtctttctgataatactacacctgtaaaattgaatgctcaaactgagatttctgaacaaacagcagctggggaactagatggaggaaatgatgtatctgatctacactcatctgaagaaacgaataccaaaatgaaaaattatgaagaaatgatgatcggcgaggcaatggctgaaactggccatgatggtgaaacagagaatgagggcataactaccaaaacctcaaagcctgatgaagctgaaacaaacatgttgactgcagaaatggacaactttgtttgtgacacagttgaaatgagcactgaagaaggaatcattgacgctaataaaactgaaacaaatactgagtatagtaaatctgaagaaaaattagataacaatcaaatggtaatggaaagtgatattttacaggaagatcaccatacttcacagaaagtggaggaaccatcacagtgtctggcatctggaacagctatctctgagctaataatagaagacaataatgcatctcctcaaaaactaagggaacttgatccttcacttgtgtcagcaaatgacagtcctagtggcatgcagacacgctgtgtctggtctcctttggcttctccgtctacgagcattttaaagagaggactaaaaagatcccaagaagatgaaatctcatcacctgttaataaggttcgccgtgtctcctttgcagatccaatataccaagcaggattggcagatgacattgatagacggtgctctattgttaggtcccattcttccaatagttctcccataggaaaaagtgttaaaacttctcctactacacaatctaagcataataccacttcagccaaaggatttctgtccccaggatcacgtagccctaaatttaagagctcaaagaagtgtttaatttcagaaatggccaaagaatccataccatgcccaacagaaagtgtttacccaccattggtgaactgtgtggcaccagttgacatcattttacctcagattacatcaaacatgtgggcaagaggcctgggacaactcattagagctaagaatataaaaactattggtgatttgagtactcttacagcatctgaaataaaaactcttcctatccgttctccaaaagtgtccaatgtaaaaaaggctctcagaatatatcatgagcagcaggtgaagactcgtggactagaagagattccagtttttgatatttctgaaaaaacagtaaatggaatagaaaataaatctttgtcacctgatgaagaaagacttgtctcagatataattgatcctgttgctttagaaattccattatccaaaaaccttgtggcacagattagtgctcttgctcttcagctggattcagaagatcttcataattattcaggaagccaactatttgaaatgcacgagaaactaagttgtatggcaaactctgtaataaaaaatctacagtcacgttggagatcaccatcccatgaaaattctatttagtattttcagagaaaattgaaggtttttttaaacatcactggatttcttgattgaggaaacaagttctgaaataatagcacaatttcaaagaagagactctttgcaaagttgataacatttcaaaccctgaaggacagtgacttattatccttcctttctccaaagaacagttaaaaccaaatgtgttatggtaagctgtaaataccgttggaataaaagataaccgttcatcttacctaaaaaattgaagacaatattttccattgttgatgtcacaatttcttgaagatggctctttgcagcctacgtggtagtggagatatatacaaaggacttccctagtatcgttggaccaacaagcacaagcagatggcaggaagattagaacattggatattgattgccagtttttaagtgtcattcttggaaacgtgggagatttaggaaatgacattgaagaggaagaattctgttgaaatagtgattctcaacgtggggtccttggacagcaagtgatggggattggaatcccttttccaacgttttctttatacaacacctgtatgacacaagaaagcatccagaaaaaacaagagcagtcaaaacagccctttcatctaccttgtggggaacctggtataaaactacagacgtcagacagaaaagacagattcaacaagtcaacctctctgttcaggcacagatctggttttaatgatgaactctacaatgctaattctggaaatgaaaaagtacaatggaaagcattaagttatataacgctgaggaatcttgttaattctacttatagtatttcaaatctagtcaagtcactgaaaatgttcaagtataatcggaaatgtgtctttccgatagccgttcctggtgagacatcctctttatataaaacctgggcattcagaatcaggacagtgttaacacagaagaaaagaaaacccagcagttcctggagaaagactaggacacatggcttttgtgaaaacaagacactagacgatgttcccaggggttttcgccatgaaccttgccatgggtgaggaaaagatactatattttctccccaataccaccaacgaagtaacagatgagtctttcatgctgtgatttgggattaagatacaaggtgagcccagagatgaattgggcacacatttcctggggcaggatgggagttgtggagggctgcacaacagccccactgcaagcctgggatatccagaggcatcttcctcagcacccctaggtgcctgtgggctgtgccttacatttaataaaaacttacaaggntnaaaaaaaaaaaaaaaaaaaaaaaaaaaaaaaaaaaaaaaaaaaaaaaaaaaaaaa

SEQ ID NO: 217 - DNA, 3567 bp, Homo sapiens
cgccatcccgcgctctgcggactgggaggcccgggccaggacgcgagtctgcgcagccgaggttccccagcgccccctgcagccgcgcgtaggcagagacggagcccggccctgcgcctccgcaccacgcccgggaccccacccagcggcccgtacccggagaagcagcgcgagcacccgaagctcccggctcggcggcagaaaccgggagtggggccgggcgagtgcgcggcatcccaggccggcccgaacgtccgcccgcggtgggccgacttcccctcctcttccctctctccttcctttagcccgctggcgccggacacgctgcgcctcatctcttggggcgttcttccccgttggccaaccgtcgcatcccgtgcaactttggggtagtggccgcttagtgttgaatgttccccaccgagagcgcatggcttgggaagcgaggcgcgaacccgggccccgaagccgccgtccgggagacggtgatgctgttgctgtgcctgggggtcccgaccggccgcccctacaacgtggacactgagagcgcgctgctttaccagggcccccacaacacgctgttcggctactcggtcgtgctgcacagccacggggcgaaccgatggctcctagtgggtgcgcccactgccaactggctcgccaacgcttcagtgatcaatcccggggcgatttacagatgcaggatcggaaagaatcccggccagacgtgcgaacagctccagctgggtagccctaatggagaaccttgtggaaagacttgtttggaagagagagacaatcagtggttgggggtcacactttccagacagccaggagaaaatggatccatcgtgacttgtgggcatagatggaaaaatatattttacataaagaatgaaaataagctccccactggtggttgctatggagtgccccctgatttacgaacagaactgagtaaaagaatagctccgtgttatcaagattatgtgaaaaaatttggagaaaattttgcatcatgtcaagctggaatatccagtttttacacaaaggatttaattgtgatgggggccccaggatcatcttactggactggctctctttttgtctacaatataactacaaataaatacaaggcttttttagacaaacaaaatcaagtaaaatttggaagttatttaggatattcagtcggagctggtcattttcggagccagcatactaccgaagtagtcggaggagctcctcaacatgagcagattggtaaggcatatatattcagcattgatgaaaaagaactaaatatcttacatgaaatgaaaggtaaaaagcttggatcgtactttggagcttctgtctgtgctgtggacctcaatgcagatggcttctcagatctgctcgtgggagcacccatgcagagcaccatcagagaggaaggaagagtgtttgtgtacatcaactctggctcgggagcagtaatgaatgcaatggaaacaaacctcgttggaagtgacaaatatgctgcaagatttggggaatctatagttaatcttggcgacattgacaatgatggctttgaagatgttgctatcggagctccacaagaagatgacttgcaaggtgctatttatatttacaatggccgtgcagatgggatctcgtcaaccttctcacagagaattgaaggacttcagatcagcaaatcgttaagtatgtttggacagtctatatcaggacaaattgatgcagataataatggctatgtagatgtagcagttggtgcttttcggtctgattctgctgtcttgctaaggacaagacctgtagtaattgttgacgcttctttaagccaccctgagtcagtaaatagaacgaaatttgactgtgttgaaaatggatggccttctgtgtgcatagatctaacactttgtttctcatataagggcaaggaagttccaggttacattgttttgttttataacatgagtttggatgtgaacagaaaggcagagtctccaccaagattctatttctcttctaatggaacttctgacgtgattacaggaagcatacaggtgtccagcagagaagctaactgtagaacacatcaagcatttatgcggaaagatgtgcgggacatcctcaccccaattcagattgaagctgcttaccaccttggtcctcatgtcatcagtaaacgaagtacagaggaattcccaccacttcagccaattcttcagcagaagaaagaaaaagacataatgaaaaaaacaataaactttgcaaggttttgtgcccatgaaaattgttctgctgatttacaggtttctgcaaagattgggtttttgaagccccatgaaaataaaacatatcttgctgttgggagtatgaagacattgatgttgaatgtgtccttgtttaatgctggagatgatgcatatgaaacgactctacatgtcaaactacccgtgggtctttatttcattaagattttagagctggaagagaagcaaataaactgtgaagtcacagataactctggcgtggtacaacttgactgcagtattggctatatatatgtagatcatctctcaaggatagatattagctttctcctggatgtgagctcactcagcagagcggaagaggacctcagtatcacagtgcatgctacctgtgaaaatgaagaggaaatggacaatctaaagcacagcagagtgactgtagcaatacctttaaaatatgaggttaagctgactgttcatgggtttgtaaacccaacttcatttgtgtatggatcaaatgatgaaaatgagcctgaaacgtgcatggtggagaaaatgaacttaactttccatgttatcaacactggcaatagtatggctcccaatgttagtgtggaaataatggtaccaaattcttttagcccccaaactgataagctgttcaacattttggatgtccagactactactggagaatgccactttgaaaattatcaaagagtgtgtgcattagagcagcaaaagagtgcaatgcagaccttgaaaggcatagtccagttcttgtccaagactgataagaggctattgtactgcataaaagctgatccacattgtttaaatttcttgtgtaattttgggaaaatggaaagtggaaaagaagccagtgttcatatccaactggaaggccggccatccattttagaaatggatgagacttcagcactcaagtttgaaataagagcaacaggttttccagagccaaatccaagagtaattgaactaaacaaggatgagaatgttgcgcatgttctactggaaggactacatcatcaaagacccaaacgttatttcaccatagtgattatttcaagtagcttgctacttggacttattgtacttctgttgatctcatatgttatgtggaaggctggcttctttaaaagacaatacaaatctatcctacaagaagaaaacagaagagacagttggagttatatcaacagtaaaagcaatgatgattaaggacttctttcaaattgagagaatggaaaacagcccgccc

SEQ ID NO: 218 - DNA, 4834 bp, Homo sapiens
cgaggtcagaggggaggaggactctggagctgacagcgcgcacttcacccgcagttgttctagcgactgcgaagatagctcgctgagctggaaccccacagatcaccaacaaaaatgaaggcggcagatgagcctgcctacctgacagtgggaaccgatgtcagtgccaagtaccgaggtgccttctgtgaggcaaagattaagactgtgaaaaggctggtgaaagttaaggtactcctgaaacaggataataccacacaattggtacaagatgaccaagtaaagggtcctttaagagttggagctattgttgaaacaaggacatctgatggatcttttcaggaagctattatcagcaagttgacagatgctagttggtataccgtggtgtttgatgatggtgatgagcgaacattgagacgtacctcactttgtctgaaaggagagagacattttgcagagagtgagacacttgaccagcttccattaacaaatccagagcattttggaactccagtaattgcaaagaagacgaacagaggaaggagatcttctcttcctgttactgaagatgaaaaggaagaagaaagcagtgaagaggaagatgaagacaagcgccgtctcaatgatgaattactaggaaaagttgtaagtgtggtgtctgcaacggagaggactgaatggtatcctgctttggtaatatctcccagctgtaatgatgacatcacagtgaaaaaggatcagtgtttagttcgatcatttattgattctaaattttactctatagcaagaaaggacattaaggaagtagacattctcaatctaccggaatctgagctctccactaaaccagggcttcagaaagcaagcatcttcttaaaaactagagttgttcctgataattggaaaatggatataagtgaaatccttgagtcatccagtagtgatgatgaagatggcccagctgaagaaaatgatgaagagaaggaaaaggaggccaaaaagacagaagaagaggtgcctgaggaagaacttgatcctgaagagagggacaacttcctccagcagctttataagtttatggaagacagaggtactccaatcaacaaaccacctgttttgggctataaagatctcaatctcttcaaactcttcagactggtttatcatcagggtggatgtgacaatattgatagtggtgctgtatggaagcaaatttatatggaccttggcattcctattttgaattcagctgcttcctacaatgtaaaaactgcttatagaaagtatctctatggttttgaggagtactgccgttcggcaaatattcagttcagaactgttcatcaccatgaaccaaaagtaaaagaggaaaaaaaagacttagaagaatcaatggaagaggctctcaaattagatcaagaaatgcctttaacagaagtgaagagtgaacctgaggaaaatatcgattcaaacagtgaaagtgaaagagaagagatagaattaaaatctccgaggggacgaaggagaattgctcgagatgtaaattctattaaaaaggaaattgaagaagagaaaacagaagacaaattaaaagataatgatacagaaaataaggatgtagatgatgactatgaaactgcagagaaaaaagaaaatgagctactactggggagaaaaaatacaccaaagcaaaaagagaagaaaattaaaaaacaggaggattctgacaaagactcagatgaagaggaagagaaaagccaagagagggaagaaactgaaagcaaatgtgactctgaaggagaggaagatgaggaagacatggaaccctgcctaacaggaaccaaagtgaaagtaaaatatggacgagggaagactcagaaaatttatgaagccagtattaaaagcactgaaattgatgacggagaagttttatatttggtacattactatggatggaatgtcaggtatgatgagtgggtgaaggctgacaggataatctggcctttggacaaaggtggaccaaagaaaaaacagaagaaaaaagctaaaaataaagaagatagtgaagtggacgaaaagagagatgaggagaggcagaagtcaaaacggggacgacctcctttaaaatcaaccctctcatcaaacatgccgtatggcttatctaagacagcaaacagtgaaggaaaatcagactcttgttcatctgatagtgaaacagaagatgctttagaaaagaatttaataaatgaagaactttctcttaaagatgaactagaaaaaaatgaaaatttgaatgatgataagctagatgaagaaaatccaaagatttctgcacatatattaaaagaaaatgataggactcaaatgcagcctttagaaaccctgaagttagaagttggagagaatgaacaaatagtacagatttttgggaacaaaatggaaaaaacagaagaagttaagaaagaagccgaaaaatctccaaaaggaaagggaagacgaagcaagacaaaagatctttctttagaaattataaagatttcatcatttggccagaatgaagcaggaagtgaacctcatatagaagctcatagtcttgaattgtcttcattagacaataaaaacttttcttctgctacagaagatgaaattgaccaatgtgtgaaagaaaagaagttgaaacggaaaatactaggacaatcatcgccagagaaaaaaataagaattgagaatggaatggaaatgacaaatactgtatctcaagaaaggaccagtgattgtattggatctgagggaatgaaaaacttaaattttgaacagcactttgaaagagaaaatgaaggaatgccatcattgatagcagagtcaaaccaatgcatccaacaactgactagtgaaagatttgatagtccagctgaagaaactgtaaatattccactaaaagaagatgaggatgcaatgcctctgatcgggcctgaaaccttggtttgccatgaagtagatttggatgatttggatgaaaaggataagaccagcattgaggatgtagcagttgaaagctctgagtctaactctcttgtttctattccacctgccctacctcctgtagtccaacataacttttcagtagcttcaccacttactcttagtcaagatgagtctcgaagcgtaaaaagtgagagtgatataacgattgaagttgatagtattgctgaagaatctcaagaaggtctctgtgagagggaatcggcaaatggatttgaaactaatgttgcctctggtacctgtagtataattgtacaagagagagagagcagagagaagggtcagaagaggccaagtgatggaaatagtggattaatggcaaaaaagcaaaagcgtaccccaaagcgaacaagtgctgcagccaaaaatgaaaagaatggaacaggacaaagcagtgatagtgaagatcttcctgtcctagacaattcaagtaaatgtaccccagtaaagcatcttaatgtatctaagccacagaaacttgcacgatctcctgcaagaatatccccgcacatcaaagatggagagaaagataaacacagagaaaaacatccgaattcatcccctaggacatataaatggagctttcagctcaatgaattagataatatgaacagtacagagagaatctcatttctccaagaaaaactacaggaaatcagaaaatattatatgtctttgaagtctgaagttgcaaccatagacaggaggagaaaaagattaaaaaagaaagacagggaagtgtctcatgcgggagcctccatgtcatctgcttcatcagacactggaatgagtccctcatcatcgtctcccccacaaaatgtacttgctgtagaatgtaggtgataaacattttctctaccttcccagcagtttgctgccatggacataaatccccaaaccctgaattacaaccacagaaagcactcaactggtttgacattgctaagtatatcctgtatacttttccaggctggattgtatctatgcccctctctcttcttttttcttgttgcaaaaaataagctgattaataagtgaaggttaagcagcctgccatatttgtcataatttttcctctttacttttgtttttcgtttgttgtgatatagaacaaagggcacttagcaaatttgaatttgtataataaagctttcaggtgttacagaaatcgtagacaagcaagtgcacatgataaacaatcaaaatattacccagctgaatagttactgctgcactttcactaagatgtatttgaacacttggtgagtagggggtttatgttgtgttttttttcattatcgttttttttatttttgtgaagcacttgctatttagaactgccaaagtatatgttcagcagtgtgcccaggattgaaggtgtaaatgggacaaaataaattgtgaaaggaagtgtagttgactgaaaactacagttgtaataagtcttccactttttataggatttttgagcacacaattatgcaaatattttaatgtttattaatgtttacagtggaattgtgaataagttttcagtggactatcttatcccttgacaaaaatattttgtcttttttctatgtaatttcagagtttttattttgttacaaaaagacaaaaatgaaatatataacaacaatgaagttatttaacaagatttctaaagctgaaatttttgtgtaaaataaggtattatcttgcaacttgttaaatatatttattcagacattggatgttgtatttttatgtattttttaaaatattaataaaatttaaaaaaaaaaaaaaa

SEQ ID NO: 219 - DNA, 6217 bp, Homo sapiens
cgctcccgccccagctcgcgctgcccgggcgggcgccggccgctggcgccgctactgctgccgcccccggggcgcgagtccgccgcccgccgcccgggcacccggcgaggggcgggggcagctccgaaccggccccagatccttcccgcttccgcctcacgcttcccggaaagcttgtccctctccgccgagctgctccgggagccccgccgcgccgagggtatctcccagagccccagctggtgtggccaggccccaggagtaggatggggctccccctacgagggccggtggcagccagaactgatacagcccccctggtctggggccaggacgccagctgaggagggcaggagtgtctggagctatggctggtgcctcggtgaaagtggcagtgagggttcggccctttaacgcccgtgagaccagccaggatgccaagtgtgtggtcagcatgcagggcaacaccacctccatcatcaatcctaaacagagcaaggatgcccccaaaagcttcacctttgactactcctactggtcacacacttcgacggaggacccccagtttgcatctcagcagcaagtgtatcgggacattggagaagagatgctgctccacgcctttgaaggctacaacgtgtgcatctttgcctatgggcagaccggggctgggaaatcctataccatgatggggcgacaggagccagggcagcagggcatcgtgccccagctctgtgaggacctcttctctcgcgttagtgagaaccagagtgctcagctatcctactctgtggaggtgagctatatggagatctactgtgagcgggtacgagacctcttgaaccccaagagtcggggttctctgcgggtccgggagcaccccatcctgggcccgtacgtgcaggacctgtccaaattggctgtgacctcctacgcagacattgctgacctcatggactgtggaaataaagcacggactgtggctgccaccaacatgaatgagaccagcagccgttcccatgccgtctttaccatcgtcttcacacagcgctgccatgaccagctcacggggctggactcggagaaggtcagtaagatcagtttggtggaccttgctgggagtgagcgagccgactcctcaggggcccggggcatgcgcctgaaggaaggagccaacatcaataagtccctgactacactagggaaagtgatctcggcccttgcagatatgcaatcaaagaagcgaaagtcggattttatcccctacagggactctgtgctcacctggctgctcaaggaaaatttgggggggaactcacgcacagccatgattgcagccctgagccctgctgacatcaattacgaggagactctcagcaccctcaggtatgctgaccgcaccaagcaaatccgctgcaatgccatcatcaacgaggaccctaatgcccggctgattagagagctgcaggaggaagtagcccggctgcgggaactgctgatggctcagggactgtcagcctctgctctggaaggcctgaagacggaagaagggagtgtcagaggcgccctgccagctgtgtcatctcccccagctccagtttcaccctcatcacccaccacacataatggggagctggagccgtcattctcccccaacacggagtcccagattgggcctgaggaagccatggagaggctgcaggagacagagaagattatagctgagctgaacgagacatgggaggagaagctacgcaagacagaagccctgaggatggagagagaagcattgctggctgagatgggggtggccgtccgggaggatgggggaactgtgggcgtcttctctccaaagaagactccccacctggtgaacctgaacgaagaccctctgatgtctgagtgtctgctctaccacatcaaagatggcgtcaccagggtcggccaagtagatatggacatcaagctgaccggacagttcattcgggagcaacactgtctgttccggagcatcccccagccagatggagaagtggtggtcactctggagccttgtgaaggagctgagacatatgtgaatgggaagcttgtgacggagccgctggtgctgaagtcagggaataggattgtgatgggcaagaaccacgttttccgcttcaaccacccggagcaggcaaggctggaacgggaacgaggggtccccccacccccaggaccgccctctgagccagtcgactggaactttgcccagaaggaactgctggagcagcaaggcatcgacataaagctggaaatggagaagaggctgcaggatctggagaatcagtaccggaaagaaaaggaagaagccgatcttctgctggagcagcagcgactgtatgcagactcggacagcggggatgactctgacaagcgctcttgtgaagagagctggaggctcatctcctccttgcgggagcagctgccgcccaccacggtccagaccattgtcaaacgctgtggtctgcccagcagtggcaagcgcagggcccctcgcagggtttatcagatcccccagcgacgcaggctgcagggcaaagacccccgctgggccaccatggctgacctgaagatgcaggcggtgaaggagatctgctacgaggtggccctggctgacttccgccacgggcgggctgagattgaggccctggccgccctcaagatgcgggagctgtgtcgcacctatggcaagccagacggccccggagacgcctggagggctgtggcccgggatgtctgggacactgtaggcgaggaggaaggaggtggagctggcagtggtggtggcagtgaggagggagcccgaggggcggaggtggaggacctccgggcccacatcgacaagctgacggggattctgcaggaggtgaagctgcagaacagcagcaaggaccgggagctgcaggccctgcgggaccgcatgctccgcatggagagggtcatccccctggcccaggatcatgaggatgagaatgaagaaggtggtgaggtcccctgggccccgcctgaaggatcagaggcagcagaggaggcagcccccagtgaccgcatgccgtcagcccggcccccctcgccgccactgtcaagctgggagcgggtgtcacggctcatggaggaggaccctgccttccgtcgtggtcgtcttcgctggctcaagcaggagcagctacggctgcagggactgcagggctctgggggccggggcggggggctgcgcaggcccccagcccgctttgtgccccctcacgactgcaagctacgcttccccttcaagagcaacccccagcaccgggagtcttggccagggatggggagcggggaggctccaactccgctccaaccccctgaggaggtcactccccatccagccacccctgcccgccggcctccgagtccccgaaggtcccaccatccccgcaggaactccctggatggagggggccgatcccggggagcgggttctgcacagcctgaaccccagcacttccagcccaaaaagcacaactcttatccccagccaccccaaccctacccagcccagcggcccccagggccccgctaccccccatacactactcccccacgaatgagacggcagcgttctgcccctgacctcaaggagagtggggcagctgtgtgagtcccacatcctgggcagagggcctggtggggccccttgctaggagaagggaagacgcccgagacgctgcttccccagaagtgctggggcagggaggcccaggagatgagagagaaggtccgagtaggtgatagaagacaagggggagaccgagccggaggctgaggaaaggaagagggcacggagttgccaggagcaaaccaaagtgaagagagagataggaagctgcctcggggccaccccttgcaaagggggtgtgtcccacaaacgctgctatgggtggggtggggggctggggtgctgcgtagccagtgtttgactttcttttcaagtgggggaaagtgggagaggactgagagtgaggcaagttctccccagcccctgtccgtctgtctgtctgtctgtggtggtttctgtttcttgggaggcatggtaggatcataagtcattcccctccccttccaggcctcctgctatatttgggggacctgactggtttggctggagtcccatgaggatgtgggccctttaataaaggatagcaaacagggagcttgtggcctgtttgttttgggttttcatggaggtgtaggttatataaggcaatggcacaggtcttaagcatacttatcagtgaagtattgtatgtgtgctctgtgcaggcaccacccagatctggatataagaatgtttccatcttgtcttcctgaacttcaccctcctgtctcttccttcaggttgcgcagcccgatcttttccccgctttttttttttgggagacagggtcttgctttgttgcccaggctggaggtacagtcttggctcactgcagcctccgcctcctgagtagctgggattacaggcatgtgccaccacgcccggctcattactgttttttttgtagtgacgaggtttcgccgtgttggccaggctggtctcgaactcctgatgacctcaagtgatccgcccgccttggcctcccagagtggtgggattgcagagacagtgatcttgctatgctgcccaggctggtctcaaccttatgggctcaagtgatcctcccacctcagcctcccaaagtgctaggattacctgcgtgagctacagcgccctgcctgttctgggcttcttgcagagcctcttcagctgcagagaagcagctctcctttctccaagtccagagccaacaggacgaataatgaagctgttgggaagatttactgataatacatgtaaagggtctagcacattttaggagctcaaggttggtgccttccctttttctttactctgaaccggatatgaggccttgagaaagaagagaggcgcttgcaaaacgaggtgaggtctcaggcacagtggctcacgcctgtaatcccagcactttaggagaccgaggcgggcggatcatgaggtcaggagttcgagaccagcctggccaacatggtgaaagcccgtctctactaaaaatacaaaaattagacgggcatggtggtgggcacctgtaatcccggctacttgggaggttgagggaggagaatcgcttgaacccaggaggtggaggttgcagtgagccgagactgcaccattgcactccagcctgggcaatagagcgagactccgtctcaagcaagcaagcaagcaaacaaacaaaataaaaaacgaggtcaagtttcaaaagatgtcacccccaacctggcaaaacttctcctcaagccctgtcgttccactcttgtccgccaggaggagaaaaggttccctcgaaggacgtctttgcttgcgcgttcacggagccttgagaacgagtggccgaggggacccctgcggccctgcgcgcctaagggaggacctgactcctttcagaagtagcatttcttccccttcgtgggtgctcttgagttccaaagaaaaggaagagaagccttcattgagcagcttcttctgccttagggactgtgctagggggtagatcgaccttaggggaaacaatccccgcttattagaggaggttttggatcagggtttgctttatttgaaatttaacaaatacagaaaagcagaaggaagaaaattgaagtaatccatgtttccactgggcgcggcggctcacgcctataatcccagcactttgggaggccaaggcgggcggatcacgaggtcaggagttcgagaccagcctgaccaacatggtgaaaccccccgtctctactaaaattacaaaattagccggtcgtggtggcacacgcctgtaatcccagctactcaggaggctgaggcaggagaatcgcttgaacccgggaggcagaggttgcagtgagccgagattgcaccactgcactccagcctgagcaacagagtgagactccgttgtctttaaaggccaatcccatagcaaatgacagagactcacttgagtaagaaaggtttttgacaagaaaacccacagaagaagaggtaagctgtggatataagaaaggcactacaatctgtatttaaatctaattgcacactagataatatatgtatgaaaaattattt

SEQ ID NO: 220 - DNA, 6280 bp, Homo sapiens
  misc_feature (688)..(688): n is a, c, g, or t
  misc_feature (705)..(705): n is a, c, g, or t
  misc_feature (876)..(876): n is a, c, g, or t
  misc_feature (887)..(887): n is a, c, g, or t
  misc_feature (895)..(895): n is a, c, g, or t
  misc_feature (897)..(897): n is a, c, g, or t
  misc_feature (958)..(958): n is a, c, g, or t
  misc_feature (979)..(979): n is a, c, g, or t
  misc_feature (1150)..(1151): n is a, c, g, or t
  misc_feature (1153)..(1157): n is a, c, g, or t
  misc_feature (1161)..(1161): n is a, c, g, or t
  misc_feature (1360)..(1360): n is a, c, g, or t
  misc_feature (1379)..(1379): n is a, c, g, or t
  misc_feature (1525)..(1525): n is a, c, g, or t
  misc_feature (1634)..(1634): n is a, c, g, or t
  misc_feature (1719)..(1719): n is a, c, g, or t
  misc_feature (1768)..(1768): n is a, c, g, or t
  misc_feature (1771)..(1771): n is a, c, g, or t
  misc_feature (2239)..(2239): n is a, c, g, or t
  misc_feature (2245)..(2245): n is a, c, g, or t
  misc_feature (2260)..(2260): n is a, c, g, or t
  misc_feature (2290)..(2290): n is a, c, g, or t
  misc_feature (2294)..(2294): n is a, c, g, or t
  misc_feature (2358)..(2358): n is a, c, g, or t
  misc_feature (2365)..(2365): n is a, c, g, or t
  misc_feature (2577)..(2577): n is a, c, g, or t
  misc_feature (2667)..(2667): n is a, c, g, or t
  misc_feature (2729)..(2729): n is a, c, g, or t
  misc_feature (2806)..(2806): n is a, c, g, or t
  misc_feature (2854)..(2854): n is a, c, g, or t
  misc_feature (2861)..(2861): n is a, c, g, or t
  misc_feature (3085)..(3085): n is a, c, g, or t
  misc_feature (3165)..(3165): n is a, c, g, or t
  misc_feature (3509)..(3509): n is a, c, g, or t
  misc_feature (3690)..(3690): n is a, c, g, or t
  misc_feature (3884)..(3884): n is a, c, g, or t
  misc_feature (3905)..(3905): n is a, c, g, or t
  misc_feature (3916)..(3916): n is a, c, g, or t
  misc_feature (4146)..(4146): n is a, c, g, or t
  misc_feature (4247)..(4247): n is a, c, g, or t
  misc_feature (4422)..(4422): n is a, c, g, or t
  misc_feature (4431)..(4431): n is a, c, g, or t
  misc_feature (4438)..(4438): n is a, c, g, or t
  misc_feature (4461)..(4461): n is a, c, g, or t
  misc_feature (4466)..(4466): n is a, c, g, or t
  misc_feature (4468)..(4468): n is a, c, g, or t
  misc_feature (4471)..(4471): n is a, c, g, or t
  misc_feature (4473)..(4475): n is a, c, g, or t
  misc_feature (4477)..(4479): n is a, c, g, or t
  misc_feature (4508)..(4508): n is a, c, g, or t
  misc_feature (4970)..(4970): n is a, c, g, or t
  misc_feature (4975)..(4980): n is a, c, g, or t
  misc_feature (4983)..(4983): n is a, c, g, or t
  misc_feature (4985)..(4991): n is a, c, g, or t
  misc_feature (4993)..(4995): n is a, c, g, or t
  misc_feature (5107)..(5107): n is a, c, g, or t
  misc_feature (5302)..(5302): n is a, c, g, or t
  misc_feature (5378)..(5378): n is a, c, g, or t
  misc_feature (5381)..(5381): n is a, c, g, or t
  misc_feature (5383)..(5383): n is a, c, g, or t
  misc_feature (5395)..(5395): n is a, c, g, or t
  misc_feature (5422)..(5422): n is a, c, g, or t
  misc_feature (5457)..(5457): n is a, c, g, or t
  misc_feature (5473)..(5473): n is a, c, g, or t
  misc_feature (5476)..(5476): n is a, c, g, or t
  misc_feature (5479)..(5480): n is a, c, g, or t
  misc_feature (5484)..(5484): n is a, c, g, or t
  misc_feature (5920)..(5920): n is a, c, g, or t
  misc_feature (5929)..(5929): n is a, c, g, or t
  misc_feature (6018)..(6018): n is a, c, g, or t
  misc_feature (6102)..(6102): n is a, c, g, or t
tggtctgacctcttcctacagcctgtggtggatgctgaggagttccctgaagcaatattcctttgaggcgttaagagaaaaaagcaactacagtgacatccctgatgtcaagaatgactttgccttcatccttcatctggctgatcagtatgatcctctttattccaaacgcttctccatattcctatcagaggtcagtgagaacaaactgaaacagatcaacctcaataatgaatggacagttgagaaactgaaaagtaagcttgtgaaaaatgcccaggacaagatagaactgcatctttttatgctcaacggtcttccagacaatgtctttgagttaactgaaatggaagtgctaagcctggagcttatcccagaggtgaagctgccctctgcagtctcacagctggtcaacctcaaggagcttcgtgtgtaccattcatctctggtcgtagaccatcctgcactggcctttctagaggagaatttaaaaatcctccgcctgaaatttactgaaatgggaaaaatcccacgctgggtatttcacctcaagaatctcaaggaactttatctttcgggctgtgttctccctgaacagttgagtactatgcagttggagggctttcaggacttaaaaaatctaaggaccctgtacttgaagagcagcctctcccggatcccacaagtngttacagacctcctgcnttcattgcagaaactgtcccttgataatgagggaagcaaactggttgtgttgaacaacttgaaaaagatggtcaatctgaaaagcctagaactgatcagctgtgacctggaacgcatcccacattccattttcagcctgaataatttgcatgagttagacctaagggaaantaaccttaaanctgtggangngatcattagctttcagcatcttcagaatctttcctgcttaaagttgtggcacaataacatngcttatattcctgcacagatnggggcattatctaacctagagcagctctctttggaccataataatattgagaatctgcccttgcagcttttcctatgcactaaactacattatttggatctaagctataaccacttgaccttcattccagaagaaatccagtatctgagtaatttgcagtactttgctgtnncnnnnnacantattgagatgctaccagatgggctgtttcagtgcaaaaagctgcagtgtttacttttggggaaaaatagcttgatgaatttgtcccctcatgtgggtgagctgtcaaaccttactcatctggagctcattggtaattacctggaaacacttcctcctgaactagaaggatgtcagtccctaaaacggaactgtctgatngttgaggagaacttgctcnaatactcttcctctccctgtaacagaacgtttacagacgtgcttagacaaatgttgacttaaagaaaagagacccgtgtttcaaaatcatttttaaaagtatgctcggccgggcgtggtggctcatgcctataatcccagcacttngggaggccaagatgggcggattgcttgaggtcaggagttcgagaccagtctggccaacctggtgaaaccccatctctgctaaaactacaaaaaaattagccaggcgtgntggcgtgcgcctgtaatcccagctacttgggaggctgacgcaggggaattgcttgaaccagggaggtggaggttgcagtgagccnagattgtgccactgtacaccagcctgggtgacagagcaagactcttatntcnaaaaaaaaaaaaaaatgctccagggctttaaatgagaagtaaaattttctaagttaataaagatgaagaatgggtgactattatgatgaaccataactaaatgtcttattaaagcaactgagtgtctagccctaaattaaccaggtaaaaactgttaacactaacctgaagttttgtgaataactgttctttaacttattgagatgttgcaagaaatgcacatccagggtggactgggagctatgaaatgactaaattcctccttgcagtgtttaccttcaagattgtataggtattctctcctcttcttcccccagtccccattacttatttgcacacttgttttaactgacttcctgttttgatatttatcaccaagaccataaactcatcaatatgaattttcttgatgtatactcacgactgtctttgatttatgttcctaaatttttttagatagggtatgtngtgctnggcagaattcttttntggcttaatttttacttcctttcccagctngctngagtcttccttaacctggttttctcttaacaccaatgatgaaccctgagaaaatgcctgcattnggccttngcctagaacaggagctgagtatttaagatgtattatcctcgggtcatcctgaaaattaatgtattccctaaaatttcttcttgtctatcatcaaggcctttttttatttgttaagaatttttatattaaatgtaaaacatataaatattttctattgtataatcttggattcaacatctgtgaggatcatttttgtaagatacatagaattntgtgcatttctttatgaacttactgttagtgttcttggtttcggctgtttatgactcatgtttatgtacattctgctccaaaatgttttngtactctgcaactaattacttttggataacaaaagccttgtgtttaatgccctaaagtattngggggtttccttgtgagagggtggccgaatcatctacctctctcttccatagttgctgtgcaatcgtacgggtaaanttcttaattacttacaaaaactgtgatagaggggagaggtacagattnggttttnaaattgattttaaaatactttatagaaatttagtaagagttaaagcaaaagactttttttccctccatctatgtaatctctagctatgattataatgtaaaacagcctctattcagtgtctaaaatgagttctcaaaacccacaaagaaatagatccatttaactgaaattcatctcatgcctttatctaactcttctggaaaatacattttgctcctttttanaaagagctttgtgcttggccttttattatgcatatttttaatgaataaaatcaactgactcatttttgggaaatgtacanctttaatatgtttttccctaagggtctaggcattatgatgccacctcttcattttggatataactatgaagaaatctattaactgcacctacacaaaactggaaaacactataggtaaacagtactgtgtatatggaattgtggtgcgtggtatgtgttttctcttgctttgttccagaaagatgaaagtgagtctttaaagcatagcaaatagagcttcccctcacctgccacacactcctgcactaaagttcaaagaaaagaattattcaaatcaaatgaaatttgaataatattagctatcaggaatataggacaccaaacacactgcctcacacattatngtttattctgaacggaaaggaacagtgtaaaaataaactacttaccaaaacttgcctttagtcagaacattcagctctcagggaagcaggtataactgatgaaacttctaggacttcagaaaacagattctaattatatccatgttttttgttgttattttcattttttaaagtgtgagtngatgtttattttagtgtttcacaatagaattatcatgtatactgattccagtgtggcatgtgattaagttttggacatgaatatgccaaaagtgcttaaatgtttttggccacataactagctagaatttcaaaacaaaattcagatttgctaccattcacctgacgaacttctccatggctcgtcactggttnggttcaactgcagaagtcatnggctaaatttnccttatcacctacgtaaatttctagaagaatttactagcaggattaataatgaatattataaactgctttccacacactagggtataattattggtgcaatctatgttgttcttgatgccatggttttacatcttttaatttaaaccttatacaccagtgtttaggtcgcttttgagacaaggtagccctgatgcaaggaaaaatgaggctactacttcacataaaaaantagggtgttaataccacctttactgtactgttggagcagatctttattttacaagtgttcatattcacataagagaattttaaatgaagaaaattaagttngttaaattataattatgagactttcgttggcatttgatttcaagaatacatatgcattttccaaaaaataaatgtggaggttattcagaacaaaattcatagcttacggtagtaatggcatggattaattttatttgcatgcacacacagacacacatacttcatatatgcaaantatagcatnagttttngatatatctagtggttttttttncaaantngcngnnngnnntagattaaattaagtatgatagcacgttntttaattcattaatcatgaagtgctctgttccctaagttatgacatttagaagaaatcacatgctcaaccttaatctgagaacctaagtgtttttgagcattccagtaaaggagtagtgttcttttcctaacttacatcagggtacatctgtgtggcacacagatactatcttttcattcttcactcccagtcttaatttctttcccctgtatgtcactgtattttatgtcacttcacattgtgttaaacagggtaaatagagatcctcagtatctcagtgctgtggcatagctccaataggtgtgctgtggtgcactgcagtgatgtatttgcataacattgtttgatagtgaaaaattttttttcggttcaagtgttttgtgattaaaattttatgtttaattaaaatattgcataatattgatgggttcaaaaaccattaaaataatcaaacaattaanaaaannnnnnaanannnnnnncnnntgttttcaataaaattttcttttcatctttccatcttcacattctcttagcatcatcctatgcacataaggtatgttgttttccttctccactcacctaccgcactaaattngatcagcaattgtacagtaacagaatatatttgtgccagaagatttgcaatgatatttgagcatgtatttatttaggaggaagccagtgcctgtaattatgtctcattgagtagttttactttgcccatcctgcagtatttagagctgatctgtacccaaagcaggacaatgtaactgtagatctgctttgtttncagtaactgtacattgcatcagaatctgtttatttctatctggaaacagacagaatggtgggggagggaaggagtnatntngcatcctagttngtattatgaagtcatcatatatatatntgaaatagtataagctaattactgttgcagaatgncctcgatataattatntcnttnncagntggatgtgaaaagctgaagcagtgaaaacctgcagtcttatttcactggtttccttctgtttcttgtccatcacttctgtatccacagggagctatctactacatacctttggtaacaggctacattctcttcagattttttatatgaataatttcatcagcactaaagcattaacatagaataatgagccaaagtactgagtcgagatggctttcagttgagtttaatttcatatttaacttttgcatttaacttgtataatacactactgctgagaaaaacaattatgaatgccttctgcatgttgtacattatctctaacagagatggtgtcaattttaagaatacaaaggggtatagagttagaatggatgtgttcgtgcatatatatgttgtatttaaatattaatgtttacaagaagattttttttaaantcttcaaanacttcacttagtgaaataatgggccaatctggaatagagacattttatttggttagtgcaagagtgaaagctagcatttgttaaccttnacatatttatctgtgtacaattgtttttgcttctggtaatgaattattagaaaatggaagattttgttcaatgtttttggcccncaggtttactgtgtaaatctgcatttttggtggtaaatccctttgccacagattcagtagcttttggtaaacttcactgtttttaaagtaccttttgtgtaaaataaagatccaatttttataacaaatggcaaataaaaacagtaaatgctggaaaaaaaaaaaaaaaaaaaaaaaa

SEQ ID NO: 221 - DNA, 4153 bp, Homo sapiens
  misc_feature (42)..(43): n is a, c, g, or t
  misc_feature (46)..(49): n is a, c, g, or t
  misc_feature (51)..(53): n is a, c, g, or t
  misc_feature (63)..(64): n is a, c, g, or t
  misc_feature (71)..(71): n is a, c, g, or t
  misc_feature (88)..(88): n is a, c, g, or t
  misc_feature (102)..(102): n is a, c, g, or t
  misc_feature (106)..(106): n is a, c, g, or t
  misc_feature (109)..(109): n is a, c, g, or t
  misc_feature (153)..(153): n is a, c, g, or t
  misc_feature (1542)..(1542): n is a, c, g, or t
  misc_feature (3105)..(3105): n is a, c, g, or t
  misc_feature (3121)..(3121): n is a, c, g, or t
  misc_feature (3407)..(3407): n is a, c, g, or t
ccccggcccggccgggcagctggtaggtgccgtgcgcaaccnnccnnnngnnnccgccccttnnccctttnatgggaatacttttttnaaaaaaaaagagtntcgntgncgccaccccgtaggactggccgccctaaaaccgtgataaagganctgctcgccacttctcacttccgcttccttccagtaaggagtcggggtcttccccagttttctcagccaggcggcggcggcgactggcaatgtttggcctcaaaagaaacgcggtaatcggactcaacctctactgtgggggggccggcttgggggccggcagcggcggcgccacccgcccgggagggcgacttttggctacggagaaggaggcctcggcccggcgagagatagggggaggggaggccggcgcggtgattggcggaagcgccggcgcaagccccccgtccaccctcacgccagactcccggagggtcgcgcggccgccgcccattggcgccgaggtccccgacgtcaccgcgacccccgcgaggctgcttttcttcgcgcccacccgccgcgcggcgccgcttgaggagatggaagccccggccgctgacgccatcatgtcgcccgaagaggagctggacgggtacgagccggagcctctcgggaagcggccggctgtcctgccgctgctggagttggtcggggaatctggtaataacaccagtacggacgggtcactaccctcgacgccgccgccagcagaggaggaggaggacgagttgtaccggcagtcgctggagattatctctcggtaccttcgggagcaggccaccggcgccaaggacacaaagccaatgggcaggtctggggccaccagcaggaaggcgctggagaccttacgacgggttggggatggcgtgcagcgcaaccacgagacggccttccaaggcatgcttcggaaactggacatcaaaaacgaagacgatgtgaaatcgttgtctcgagtgatgatccatgttttcagcgacggcgtaacaaactggggcaggattgtgactctcatttcttttggtgcctttgtggctaaacacttgaagaccataaaccaagaaagctgcatcgaaccattagcagaaagtatcacagacgttctcgtaaggacaaaacgggactggctagttaaacaaagaggctgggatgggtttgtggagttcttccatgtagaggacctagaaggtggcatcaggaatgtgctgctggcttttgcaggtgttgctggagtaggagctggtttggcatatctaataagatagccttactgtaagtgcaatagttgacttttaaccaaccaccaccaccaccaaaaccagtttatgcagttggactccaagctgtaacttcctagagttgcaccctagcaacctagccagaaaagcaagtggcaagaggattatggctaacaagaataaatacatgggaagagtgctccccattgattgaagagtcactgtctgaaagaagcaaagttcagtttcagcaacaaacaaactttgtttgggnaagctatggaggaggacttttagatttagtgaagatggtagggtggaaagacttaatttccttgttgagaacaggaaagtggccagtagccaggcaagtcatagaattgattacccgccgaattcattaatttactgtagtagtgttaagagaagcactaagaatgccagtgacctgtgtaaaagttacaagtaatagaactatgactgtaagcctcagtactgtacaagggaagcttttcctctctctaattagctttcccagtatacttcttagaaagtccaagtgttcaggacttttatacctgttatactttggcttggtttccatgattcttactttattagcctagtttatcaccaataatacttgacggaaggctcagtaattagttatgaatatggatatcctcaattcttaagacagcttgtaaatgtatttgtaaaaattgtatatatttttacagaaagtctatttctttgaaacgaaggaagtatcgaatttacattagtttttttcatacccttttgaactttgcaacttccgtaattaggaacctgtttcttacagcttttctatgctaaactttgttctgttcagttctagagtgtatacagaacgaattgatgtgtaactgtatgcagactggttgtagtggaacaaatctgataactatgcaggtttaaattttcttatctgattttggtaagtattccttagataggtttttctttgaaaacctgggattgagaggttgatgaatggaaattctttcacttcattatatgcaagttttcaataattaggtctaagtggagttttaaggttactgatgacttacaaataatgggctctgattgggcaatactcatttgagttccttccatttgacctaatttaactggtgaaatttaaagtgaattcatgggctcatctttaaagcttttactaaaagattttcagctgaatggaactcattagctgtgtgcatataaaaagatcacatcaggtggatggagagacatttgatcccttgtttgcttaataaattataaaatgatggcttggaaaagcaggctagtctaaccatggtgctattattaggcttgcttgttacacacacaggtctaagcctagtatgtcaataaagcaaatacttactgttttgtttctattaatgattcccaaaccttgttgcaagtttttgcattggcatctttggatttcagtcttgatgtttgttctatcagacttaaccttttatttcctgtccttccttgaaattgctgattgttctgctccctctacagatatttatatcaattcctacagctttcccctgccatccctgaactctttctagcccttttagattttggcactgtgaaacccctgctggaaacctgagtgaccctccctccccaccaagagtccacagacctttcatctttcacgaacttgatcctgttagcaggtggtaataccatgggtgctgtgacactaacagtcattgagaggtgggaggaagtcccttttccttggactggtatcttttcaactatngttttatcctgtcttngggggcaatgtgtcaaaagtcccctcaggaattttcagaggaaagaacattttatgaggctttctctaaagtttcctttgtataggagtatgctcacttaaatttacagaaagaggtgagctgtgttaaacctcagagtttaaaagctactgataaactgaagaaagtgtctatattggaactagggtcatttgaaagcttcagtctcggaacatgacctttagtctgtggactccatttaaaaataggtatgaataagatgactaagaatgtaatggggaagaantgccctgcctgcccatctcagagccataaggtcatctttgctagagctatttttacctatgtatttatcgttcttgatcataagccgcttatttatatcatgtatctctaaggacctaaaagcactttatgtagtttttaattaatcttaagatctggttacggtaactaaaaaagcctgtctgccaaatccagtggaaacaagtgcatagatgtgaattggtttttaggggccccacttcccaattcattaggtatgactgtggaaatacagacaaggatcttagttgatattttgggcttggggcagtgagggcttaggacaccccaagtggtttgggaaaggaggaggggagtggtgggtttatagggggaggaggaggcaggtggtctaagtgctgactggctacgtagttcgggcaaatcctccaaaagggaaagggaggatttgcttagaaggatggcgctcccagtgactactttttgacttctgtttgtcttacgcttctctcagggaaaaacatgcagtcctctagtgtttcatgtacattctgtggggggtgaacaccttggttctggttaaacagctgtacttttgatagctgtgccaggaagggttaggaccaactacaaattaatgttggttgtcaaatgtagtgtgtttccctaactttctgtttttcctgagaaaaaaaaataaatcttttattcaaataaaaaaaaaaaaaaaaaaaaaaaaaaaaaaaa

SEQ ID NO: 222 - DNA, 3576 bp, Homo sapiens
ctcccaacaatggcggctccgagcccgagcggcggcggcggctccgggggcggcagcggcagcggcacccccggccccgtagggtccccggcgccaggccacccggccgtcagcagcatgcagggtaaacgcaaagcactgaagttgaattttgcaaatccacctttcaaatctacagcaaggtttactctgaatcccaatcctacaggagttcaaaacccacacatagagagactgagaacacacagcattgagtcatcaggaaaactgaagatctcccctgaacaacactgggatttcactgcagaggacttgaaagaccttggagaaattggacgaggagcttatggttctgtcaacaaaatggtccacaaaccaagtgggcaaataatggcagttaaaagaattcggtcaacagtggatgaaaaagaacaaaaacaacttcttatggatttggatgtagtaatgcggagtagtgattgcccatacattgttcagttttatggtgcactcttcagagagggtgactgttggatctgtatggaactcatgtctacctcgtttgataagttttacaaatatgtatatagtgtattagatgatgttattccagaagaaattttaggcaaaatcactttagcaactgtgaaagcactaaaccacttaaaagaaaacttgaaaattattcacagagatatcaaaccttccaatattcttctggacagaagtggaaatattaagctctgtgacttcggcatcagtggacagcttgtggactctattgccaagacaagagatgctggctgtaggccatacatggcacctgaaagaatagacccaagcgcatcacgacaaggatatgatgtccgctctgatgtctggagtttggggatcacattgtatgagttggccacaggccgatttccttatccaaagtggaatagtgtatttgatcaactaacacaagtcgtgaaaggagatcctccgcagctgagtaattctgaggaaagggaattctccccgagtttcatcaactttgtcaacttgtgccttacgaaggatgaatccaaaaggccaaagtataaagagcttctgaaacatccctttattttgatgtatgaagaacgtgccgttgaggtcgcatgctatgtttgtaaaatcctggatcaaatgccagctactcccagctctcccatgtatgtcgattgatatcgctgctacatcagactctagaaaaaagggctgagaggaagcaagacgtaaagaattttcatcccgtatcacagtgtttttattgctcgcccagacaccatgtgcaataagattggtgttcgtttccatcatgtctgtatactcctgtcacctagaacgtgcatccttgtaatacctgattgatcacacagtgttagtgctggtcagagagacctcatcctgctcttttgtgatgaacatattcatgaaatgtggaagtcagtacgatcaagttgttgactgtgattagatcacatcttaaattcatttctagactcaaaacctggagatgcagctactggaatggtgttttgtcagacttccaaatcctggaaggacacagtgatgaatgtactatatctgaacatagaaactcgggcttgagtgagaagagcttgcacagccaacgagacacattgccttctggagctgggagacaaaggaggaatttactttcttcaccaagtgcaatagattactgatgtgatattctgttgctttacagttacagttgatgtttggggatcgatgtgctcagccaaatttcctgtttgaaatatcatgttaaattagaatgaatttatctttaccaaaaaccatgttgcgttcaaagaggtgaacattaaaatatagagacaggacagaatgtgttcttttctcctctaccagtcctatttttcaatgggaagactcaggagtctgccacttgtcaaagaaggtgctgatcctaagaatttttcattctcagaattcggtgtgctgccaacttgatgttccacctgccacaaaccaccaggactgaaagaagaaaacagtacagaaggcaaagtttacagatgtttttaattctagtattttatctggaacaacttgtagcagctatatatttccccttggtcccaagcctgatactttagccatcataactcactaacagggagaagtagctagtagcaatgtgccttgattgattagataaagatttctagtaggcagcaaaagaccaaatctcagttgtttgcttcttgccatcactggtccaggtcttcagtttccgaatctctttcccttcccctgtggtctattgtcgctatgtgacttgcgcttaatccaatattttgccttttttctatatcaaaaaacctttacagttagcagggatgttccttaccgaggatttttaacccccaatctctcataatcgctagtgtttaaaaggctaagaatagtggggcccaaccgatgtggtaggtgataaagaggcatcttttctagagacacattggaccagatgaggatccgaaacggcagcctttacgttcatcacctgctagaacctctcgtagtccatcaccatttcttggcattggaattctactggaaaaaaatacaaaaagcaaaacaaaaccctcagcactgttacaagaggccatttaagtatcttgtgcttcttcacttacccattagccaggttctcattaggttttgcttgggcctccctggcactgaaccttaggctttgtatgacagtgaagcagcactgtgagtggttcaagcacactggaatataaaacagtcatggcctgagatgcaggtgatgccattacagaaccaaatcgtggcacgtattgctgtgtctcctctcagagtgacagtcataaatactgtcaaacaataaagggagaatggtgctgtttaaagtcacatccctgtaaattgcagaattcaaaagtgattatctctttgatctacttgcctcatttccctatcttctcccccacggtatcctaaactttagacttcccactgttctgaaaggagacattgctctatgtctgccttcgaccacagcaagccatcatcctccattgctcccggggactcaagaggaatctgtttctctgctgtcaacttcccatctggctcagcatagggtcactttgccattatgcaaatggagataaaagcaattctggctgtccaggagctaatctgaccgttctattgtgtggatgaccacataagaaggcaattttagtgtattaatcatagattattataaactataaacttaagggcaaggagtttattacaatgtatctttattaaaacaaaagggtgtatagtgttcacaaactgtgaaaatagtgtaagaactgtacattgtgagctctggttatttttctcttgtaccatagaaaaatgtataaaaattatcaaaaagctaatgtgcagggatattgccttatttgtctgtaaaaaatggagctcagtaacataactgcttcttggagctttggaatattttatcctgtattcttgttt

SEQ ID NO: 223 - DNA, 1144 bp, Homo sapiens
ttttccgactgcttatccgacgctcctccctctgtctctgtagctggagaaggtagtttccaggaaagttttccggtttgcaggccgcgcacatcgggcaggggccatcctcggtccccttgctcgttgctcgcagccccgttcggctacaagtgagtttcagggcgtcatggccaggggccaccgcggccagccgggtgtgaggctgcctttcgctgcccgcgcgctccagtggtctctgggtccgccggcgtccgtttcggcctgaacgcagcccctccgcggcgacgagcagtctcgcgccggagctcatggcctcggaggcgccgtccccgccgcggtcgccgccgccgcccacctcccccgagcctgagctggcccagctaaggcggaaggtggagaagttggaacgtgaactgcggagctgcaagcggcaggtgcgggagatcgagaagctgctgcatcacacagaacggctgtaccagaacgcagaaagcaacaaccaggagctccgcacgcaggtggaagaactcagtaaaatactccaacgtgggagaaatgaagataataaaaagtctgatgtagaagtacaaacagagaaccatgctccttggtcaatctcagattatttttatcagacgtactacaatgacgttagtcttccaaataaagtgactgaactgtcagatcaacaagatcaagctatcgaaacttctattttgaattctaaagaccatttacaagtagaaaatgatgcttaccctggtaccgatagaacagaaaatgttaaatatagacaagtggaccattttgcctcaaattcacaggtaataaaatgctaaacatgaaactgttgatgcccaagaacctgtccttctttgttgttattatgtggaaagatagacttctttggtccgtcacagcatatataagggttataaacattcttatgtgtaattatgcaaagaatgttgtagtttttccaaaaccagaattagaacttcttcatatatgtagtggttttcctactacattgtgttccaaaattttgtgatctacataaactaaaacaaaatttgtccagatattttgactgaacaaaagaactgtggacaacaataccacatttacacctaaaaaaaaa

SEQ ID NO: 224 - DNA, 3136 bp, Homo sapiens
ccgctgaggccgcggcgcccgccagcctgtcccgcgccatggccccgcgcgcccggcggcgccgcccgctgttcgcgctgctgctgctctgcgcgctgctcgcccggctgcaggtggctttgcagatcgctcctccatgtaccagtgagaagcattatgagcatctgggacggtgctgtaacaaatgtgaaccaggaaagtacatgtcttctaaatgcactactacctctgacagtgtatgtctgccctgtggcccggatgaatacttggatagctggaatgaagaagataaatgcttgctgcataaagtttgtgatacaggcaaggccctggtggccgtggtcgccggcaacagcacgaccccccggcgctgcgcgtgcacggctgggtaccactggagccaggactgcgagtgctgccgccgcaacaccgagtgcgcgccgggcctgggcgcccagcacccgttgcagctcaacaaggacacagtgtgcaaaccttgccttgcaggctacttctctgatgccttttcctccacggacaaatgcagaccctggaccaactgtaccttccttggaaagagagtagaacatcatgggacagagaaatccgatgcggtttgcagttcttctctgccagctagaaaaccaccaaatgaaccccatgtttacttgcccggtttaataattctgcttctcttcgcgtctgtggccctggtggctgccatcatctttggcgtttgctataggaaaaaagggaaagcactcacagctaatttgtggcactggatcaatgaggcttgtggccgcctaagtggagataaggagtcctcaggtgacagttgtgtcagtacacacacggcaaactttggtcagcagggagcatgtgaaggtgtcttactgctgactctggaggagaagacatttccagaagatatgtgctacccagatcaaggtggtgtctgtcagggcacgtgtgtaggaggtggtccctacgcacaaggcgaagatgccaggatgctctcattggtcagcaagaccgagatagaggaagacagcttcagacagatgcccacagaagatgaatacatggacaggccctcccagcccacagaccagttactgttcctcactgagcctggaagcaaatccacacctcctttctctgaacccctggaggtgggggagaatgacagtttaagccagtgcttcacggggacacagagcacagtgggttcagaaagctgcaactgcactgagcccctgtgcaggactgattggactcccatgtcctctgaaaactacttgcaaaaagaggtggacagtggccattgcccgcactgggcagccagccccagccccaactgggcagatgtctgcacaggctgccggaaccctcctggggaggactgtgaacccctcgtgggttccccaaaacgtggacccttgccccagtgcgcctatggcatgggccttccccctgaagaagaagccagcaggacggaggccagagaccagcccgaggatggggctgatgggaggctcccaagctcagcgagggcaggtgccgggtctggaagctcccctggtggccagtcccctgcatctggaaatgtgactggaaacagtaactccacgttcatctccagcgggcaggtgatgaacttcaagggcgacatcatcgtggtctacgtcagccagacctcgcaggagggcgcggcggcggctgcggagcccatgggccgcccggtgcaggaggagaccctggcgcgccgagactccttcgcggggaacggcccgcgcttcccggacccgtgcggcggccccgaggggctgcgggagccggagaaggcctcgaggccggtgcaggagcaaggcggggccaaggcttgagcgccccccatggctgggagcccgaagctcggagccagggctcgcgagggcagcaccgcagcctctgccccagccccggccacccagggatcgatcggtacagtcgaggaagaccacccggcattctctgcccactttgccttccaggaaatgggcttttcaggaagtgaattgatgaggactgtccccatgcccacggatgctcagcagcccgccgcactggggcagatgtctcccctgccactcctcaaactcgcagcagtaatttgtggcactatgacagctatttttatgactatcctgttctgtggggggggggtctatgttttccccccatatttgtattccttttcataacttttcttgatatctttcctccctcttttttaatgtaaaggttttctcaaaaattctcctaaaggtgagggtctctttcttttctcttttccttttttttttctttttttggcaacctggctctggcccaggctagagtgcagtggtgcgattatagcccggtgcagcctctaactcctgggctcaagcaatccaagtgatcctcccacctcaaccttcggagtagctgggatcacagctgcaggccacgcccagcttcctccccccgactccccccccccagagacacggtcccaccatgttacccagcctggtctcaaactccccagctaaagcagtcctccagcctcggcctcccaaagtactgggattacaggcgtgagcccccacgctggcctgctttacgtattttcttttgtgcccctgctcacagtgttttagagatggctttcccagtgtgtgttcattgtaaacacttttgggaaagggctaaacatgtgaggcctggagatagttgctaagttgctaggaacatgtggtgggactttcatattctgaaaaatgttctatattctcatttttctaaaagaaagaaaaaaggaaacccgatttatttctcctgaatctttttaagtttgtgtcgttccttaagcagaactaagctcagtatgtgaccttacccgctaggtggttaatttatccatgctggcagaggcactcaggtacttggtaagcaaatttctaaaactccaagttgctgcagcttggcattcttcttattctagaggtctctctggaaaagatggagaaaatgaacaggacatggggctcctggaaagaaagggcccgggaagttcaaggaagaataaagttgaaattttaaaaaaaaa

SEQ ID NO: 225 - DNA, 2304 bp, Homo sapiens
cgcgggtgcagcagttgtgtcccgacccctgggagcgccatggcagagctgtgccccctggccgaggagctgtcgtgctccatctgcctggagcccttcaaggagccggtcaccactccgtgcggccacaacttctgcgggtcgtgcctgaatgagacgtgggcagtccagggctcgccatacctgtgcccgcagtgccgcgccgtctaccaggcgcgaccgcagctgcacaagaacacggtgctgtgcaacgtggtggagcagttcctgcaggccgacctggcccgggagccacccgccgacgtctggacgccgcccgcccgcgcctctgcacccagcccgaatgcccaggtggcctgcgaccactgcctgaaggaggccgccgtgaagacgtgcttggtgtgcatggcctccttctgtcaggagcacctgcagccgcacttcgacagccccgccttccaggaccacccgctgcagccgcccgttcgcgacctgttgcgccgcaaatgttcccagcacaatcggctgcgggaatttttctgccccgagcacagcgagtgcatctgccacatctgcctggtggagcataagacctgctctcccgcgtccctgagccaggccagcgccgacctggaggccaccctgaggcacaaactaactgtcatgtacagtcagatcaacggggcgtcgagagcactggatgatgtgagaaacaggcagcaggatgtgcggatgactgcaaacagaaaggtggagcagctacaacaagaatacacggaaatgaaggctctcttggacgcctcagagaccacctcgacaaggaagataaaggaagaggagaagagggtcaacagcaagtttgacaccatttatcagattctcctcaagaagaagagtgagatccagaccttgaaggaggagattgaacagagcctgaccaagagggatgagttcgagtttctggagaaagcatcaaaactgcgaggaatctcaacaaagccagtctacatccccgaggtggaactgaaccacaagctgataaaaggcatccaccagagcaccatagacctcaaaaacgagctgaagcagtgcatcgggcggctccaggagctcacccccagttcaggtgaccctggagagcatgacccagcgtccacacacaaatccacacgccctgtgaagaaggtctccaaagaggaaaagaaatccaagaaacctccccctgtccctgccttacccagcaagcttcccacgtttggagccccggaacagttagtggatttaaaacaagctggcttggaggctgcagccaaagccaccagctcacatccgaactcaacatctctcaaggccaaggtgctggagaccttcctggccaagtccagacctgagctcctggagtattacattaaagtcatcctggactacaacaccgcccacaacaaagtggctctgtcagagtgctatacagtagcttctgtggctgagatgcctcagaactaccggccgcatccccagaggttcacatactgctctcaggtgctgggcctgcactgctacaagaaggggatccactactgggaggtggagctgcagaagaacaacttctgtggggtaggcatctgctacggaagcatgaaccggcagggcccagaaagcaggctcggccgcaacagcgcctcctggtgcgtggagtggttcaacaccaagatctctgcctggcacaataacgtggagaaaaccctgccctccaccaaggccacgcgggtgggcgtgcttctcaactgtgaccacggctttgtcatcttcttcgctgttgccgacaaggtccacctgatgtataagttcagggtggactttactgaggctttgtacccggctttctgggtattttctgctggtgccacactctccatctgctcccccaagtaggcaggctgtaggcacttgggctgactgcctgcagaagtcccaagaccctagtgaaaatacagcaggcagaactctccttggataattcccccaagaggtccccaaggattgggagcatgggaggggagctggcgggagggtgggaggtgggatttagccaggaaaggggtgagagtgattgtgttgtgggcgaggaggcgtttccaccccctggtgcctatcagggcagggtgacctactccccattgttctggaaatctccaggctgctgggcagctgggcagctgggcagagctctgggaagtgaagtcatgagtgcccgattcctcttagagaaaatccatagccttcagatcttggtgttttgaattc

SEQ ID NO: 226 - DNA, 1913 bp, Homo sapiens
gagaatttcaaccagaaagaacagccagtgcaaaggcccagagacaggaataaacttggccctgcgtcttcccaggtgaccacgccggcttcaggacatgcacggacacagccgcaacggccaggcccacgtgccccggcggaagcgccgcaaccgcttcgtcaagaagaacggccaatgcaacgtgtacttcgccaacctgagcaacaagtcgcagcgctacatggcggacatcttcaccacctgcgtggacacgcgctggcgctacatgctcatgatcttctccgcggccttccttgtctcctggctctttttcggcctcctcttctggtgtatcgccttcttccacggtgacctggaggccagcccaggggtgcctgcggcggggggcccggcggcgggtggtggcggagcagccccggtggcccccaagccctgcatcatgcacgtgaacggcttcctgggtgccttcctgttctcggtggagacgcagacgaccatcggctatgggttccggtgcgtgacagaggagtgcccgctggcagtcatcgctgtggtggtccagtccatcgtgggctgcgtcatcgactccttcatgattggcaccatcatggccaagatggcgcggcccaagaagcgggcgcagacgttgctgttcagccaccacgcggtcatttcggtgcgcgacggcaagctctgcctcatgtggcgcgtgggcaacctgcgcaagagccacattgtggaggcccacgtgcgggcccagctcatcaagccctacatgacccaggagggcgagtacctgcccctggaccagcgggacctcaacgtgggctatgacatcggcctggaccgcatcttcctggtgtcgcccatcatcattgtccacgagatcgacgaggacagcccgctttatggcatgggcaaggaggagctggagtcggaggactttgagatcgtggtcatcctggagggcatggtggaggccacggccatgaccacccaggcccgcagctcctacctggccagcgagatcctgtggggccaccgctttgagcctgtggtcttcgaggagaagagccactacaaggtggactactcacgttttcacaagacctacgaggtggccggcacgccctgctgctcggcccgggagctgcaggagagtaagatcaccgtgctgcccgccccaccgccccctcccagtgccttctgctacgagaacgagctggcccttatgagccaggaggaagaggagatggaggaggaggcagctgcggcggccgcggtggccgcaggcctgggcctggaggcgggttccaaggaggaggcgggcatcatccggatgctggagttcggcagccacctggacctggagcgcatgcaggcttccctcccgctggacaacatctcctaccgcagggagtctgccatctgacctccaggcccggccctcaccactgcccacaagagcctctgccgggggtgggatgccaggacaccccctcccacactcaggacagagccaaccctggctccgtggaccttctggaggaaggtgggggtttcaaagactgggggaccccttcctcctgactccagcacccaggcctgggaagagctcggccccgatcagcctgagttccgccagcgcctacttctggtggctctaggtccccggatccaccacccttcccccactgactcttcaaggacgtgccctctttgctctcagaaccttggggaaggtggctggactgctgggcgggggacatctcggggtttcagggtgggcagggggttagtttggggaggggggggtgcgtttcttttgcatgactgtggcctgttgctcatgactttcttttgtaaatatctataaatggagacagatggagacaccaaaaaaaaaaaaa

SEQ ID NO: 227 - DNA, 1834 bp, Homo sapiens
ccgcggagaccccaagacccacgcgcagaccgagcggtagccggggaggggagcgcggcccggccggccgagttcgcggacagggggcgccgggactcccctctccgcgcccgggacgacgcccgccggatcgcgccttgggatgtagcgcccgctcgccgcgtcccggactctcgtcggaccctccgcccagcggccctgcgtcttcccaggtgaccacgccggcttcaggacatgcacggacacagccgcaacggccaggcccacgtgccccggcggaagcgccgcaaccgcttcgtcaagaagaacggccaatgcaacgtgtacttcgccaacctgagcaacaagtcgcagcgctacatggcggacatcttcaccacctgcgtggacacgcgctggcgctacatgctcatgatcttctccgcggccttccttgtctcctggctctttttcggcctcctcttctggtgtatcgctttcttccacggtgacctggaggccagcccaggggtgcctgcggcggggggcccggcggcgggtggtggcggagcagacccggtggcccccaagccctgcatcatgcacgtgaacggcttcctgggtgccttcctgttctcggtggagacgcagacgaccatcggctatgggttccggtgcgtgacagaggagtgcccgctggcagtcatcgctgtggtggtccagtccatcgtgggctgcgtcatcgactccttcatgattggcaccatcatggccaagatggcgcggcccaagaagcgggcgcagacgttgctgttcagccaccacgcggtcatttcggtgcgcgacggcaagctctgcctcatgtggcgcgtgggcaacctgcgcaagagccacattgtggaggcccacgtgcgggcccagctcatcaagccctacatgacccaggagggcgagtacctgcccctggaccagcgggacctcaacgtgggctatgacatcggcctggaccgcatcttcctggtgtcgcccatcatcattgtccacgagatcgacgaggacagcccgctttatggcatgggcaaggaggagctggagtcggaggactttgagatcgtggtcatcctggagggcatggtggaggccacggccatgaccacccaggcccgcagctcctacctggccagcgagatcctgtggggccaccgctttgagcctgtggtcttcgaggagaagagccactacaaggtggactactcgcgttttcacaagacctacgaggtggccggcacgccctgctgctcggcccgggagctgcaggagagtaagatcaccgtgctgcccgccccaccgccccctcccagtgccttctgctacgagaacgagctggcccttatgagccaggaggaagaggagatggaggaggaggcatctgcggcgtccgcggtggccgcaggcctgggcctggaggcgggttccaaggaggaggcaggcatcatccggatgctggagttcggcagccacctggacctggagcgcatgcaggcttccctcccgctggacaacatctcctaccgcagggagtctgccatctgacctccaggcccggccctcaccactgtccacaagagcctctgccgggggtgggatgccaggacaccccctcccacactcaggacagagccaaccctgtctccatggaccttctggaggaaggtgggggtttcaaagactgggggaccccttcctcctgactccagcacccagacctgggaagagctcgaccccgatcagcctgagttccgccagcgcctacttctggtggctctaggtcccccggatccacgacccttccccc

SEQ ID NO: 228 - DNA, 4740 bp, Homo sapiens
  misc_feature (543)..(543): n is a, c, g, or t
  misc_feature (721)..(721): n is a, c, g, or t
  misc_feature (761)..(761): n is a, c, g, or t
  misc_feature (772)..(772): n is a, c, g, or t
  misc_feature (785)..(785): n is a, c, g, or t
  misc_feature (811)..(811): n is a, c, g, or t
  misc_feature (814)..(814): n is a, c, g, or t
  misc_feature (891)..(891): n is a, c, g, or t
  misc_feature (1475)..(1475): n is a, c, g, or t
  misc_feature (1540)..(1540): n is a, c, g, or t
  misc_feature (1630)..(1630): n is a, c, g, or t
  misc_feature (1660)..(1660): n is a, c, g, or t
  misc_feature (1689)..(1690): n is a, c, g, or t
  misc_feature (1692)..(1692): n is a, c, g, or t
  misc_feature (2009)..(2009): n is a, c, g, or t
  misc_feature (2112)..(2112): n is a, c, g, or t
  misc_feature (3007)..(3007): n is a, c, g, or t
  misc_feature (3018)..(3018): n is a, c, g, or t
  misc_feature (3452)..(3452): n is a, c, g, or t
  misc_feature (3721)..(3721): n is a, c, g, or t
  misc_feature (4464)..(4464): n is a, c, g, or t
gcggccgcggaggcccgtccgattgctgctccgcgctccgagcggctgtcggcgtgcgctatcgccccgccctggttagtgtctagccggccggcgaggcctgcgcagttgcagcggccggggaagatggtggaggacggcgcggaggagctggaggatctggtgcacttctccgtgtctgagttgcctagtcgcggctacggcgtcatggaggagatccggcggcagggcaagctgtgcgacgtgaccctcaagattggggaccacaaattcagtgcccaccggattgtcttagcagcctcgatcccgtatttccatgctatgtttacaaatgacatgatggagtgcaagcaggatgagattgtaatgcaaggaatggacccaagtgccctggaggctctgatcaactttgcctacaacggcaaccttgccattgaccagcaaaatgtccagtcattgctgatgggggcgagcttcctgcagctgcagagcatcaaagacgcctgctgcacattccttcgagaacggcttcacccaaaaaanctgcctgggtgtgcgccagtttgctgagacaatgatgtgtgctgtgctgtacgacgctgccaacagcttcatccaccagcactttgtggaggtgtccatgtcagaagagttcctggccctgcccttggaagacgtgcttgagctggtgtctcgggatgagctgaatgtcaaatctgangagcaggtctttgaagctgcattggcctgggtcagatacnaccgggagcanaggggtccctacntgcctgagctgctgtccaatatccgnctngcccctctgtcggccccagttcctttcagacagagtacagcaggatgacctggtgcgttgctgccacaaatgcaggnacctggtagacgaagcaaaggactaccacctcatgccagagcgccggccccacctgccagctttcagaacccggccacgctgctgcacatccatcgctggacttatctacgctgtagggggcctcaactcagcaggtgattccctgaatgtggtggaagtgttcgaccccattgccaattgctgggagagatgccgtcccatgacaacagcccgcagccgcgttggcgtggctgtggtgaacgggcttctctatgccatcggaggatatgacggccagctacggctgagcactgtggaggcctacaacccggagacagacacatggaccagagtggggagcatgaatagcaagagaagtgccatggggacagtcgtgctggatgggcagatctacgtctgtgggggctacgatggcaactcttccctcagctccgtggagacctactcacctgagacggacaaatggacagtggtgacctcgatgagctcgaatcgcagtgctgctggggttacagtctttgagggcaggatatatgtgtcaggcggccatgatggtttgcagatcttcagcagtgtggaacantacaaccaccacacagccacctggcaccctgcagctggcatgctcaacaagcgctgccggcacgnagccgcctccctggggagcaagatgtttgtctgcgggggctacgatggctctggcttcctcagcattgccgagatgtacagctctgtggncagaccagtggtgcctgattgtccccatgncacacgcgcaggagccgggtctccctggnngncagctgtgggcgcctctacgctgttgggggctacgacggacagtcaaacctaagctcagtggagatgtatgacccagagacagactgctggacattcatggcccccatggcgtgccatgagggaggggtcggtgtgggctgcatccctctcctcaccatctaaggcagaggatgggatgtggtggggcagggatctggtacagacataggcgcttccttccaggaacagtccctcaggagaggcagtggaccagaagagatggcgaaacgtgagctcgccggaggtacagtttttccaggtgcttaagccctccccnactgtgccacccttgtgaccttcaggcttgggtcatcaagatgcacagcatggaacacaagctcctctggatcctgcagctggtgacatggaactgttttctngtccacatgaacacaggctccatccaggcccagctcctacccaccgcctctctgtgggccagctgttcacagaaggccttccatctgatgctccccatcgcctgcttgctctccagccgagtctggccaatttgccatggggaggctgcagtgtccaagcctgctggaaactgggatgtagctggggacgaaaggacagacccaagcgttctccctgcctgagatggtgtggccacagcagtggaaggctgcacacaggcacattccttcttccacagtggggcaccaaggattctgtcctcattgctgggtaagcagggagaagagaagttttccccatgtctaattttgggatttcagtgaggccttttccatctgtccaggagaacagaagggaaaaaaagatacttgaaagaaactgaaggaaatttaaacaaagaaacacttgaaagaaactggaaagaaaaataatttttttatgtgaacaaattttgcaagaagaaaaaagcataaaagacactaacggcaaatctatgtttaaatggaaaatcgtctaactggagaagggcggtatccaccccacattcggatcccagggtcctgaggcctcgcattgagctgggggttccctctgagccccagtgtgtgtggaatcagtgcactcttgactgggcctgtagtaaggtgctcatggggtttgtcttctcacccaccatcagaggacttttaaaatcataggcgtagagagttagctatctgctgaattactgccactcttcttggtgggggctcctagctgtggctgggggctccaggcgcccctgtgattacctcctactgccaccatggcgctcattcagattccccactctcactaacattgcttccttttttngaccagcaggnaacagcaggtctggccagattctcacttgcccatcaatctcgttcttggatgatttccctcattgtgatgcttctggggcacgttgaccatatgcacctctagaacctaaccagggcttccttctaccagctgtgggcgggcttggtctggtaaccttgtctgctctgccattccactgctcctccatccactcgccaatcccaagagtctggcctccctccagccctgggcagactgaccagcaaggtggacctttacattcaagcacagctggcttttatgacataaagaactaaaggccgaaagaatctcttgctgctgcaaagaacagattttatatttcttcctctaatcttggcaaatgacctttaccttttggaaagatttcatattgcttcctcctccctggataggacctaatgtagcacagcgngactcaaagaggaggacattttctcttgccagtgcactgggcagtggggctgtccttcaactgctgctgccaaaattggttttctaaaattcttccagtagagactaaaagaagattcaattcctgtaacccaagactgagtcttagggctccagtctccacctgcttggtttcctatcctttgctgcctgcctggggtggcctggaagcctgttcagaaaggcacaatgtggagcctggggtgtctcccccaccccaggaccgtcagntttaccagtgtgtgcaatcgccatgtattcagagggaagtacctttgttacctacaacttaggagctaggcctctgctacaagcacttgaaaatgatatttttatttttaacgtctcaacaatctgatatcggatgtcgtttaacctgggctcgtggtagggctccagcatttctccctccttcctggtttgcctgtaggggtagactcggaaggtgggtggggtgtgcatttcctgttaggagtgtatcagtgcttgtcttattataagcccctttcttttgtgaatttgaagtagcaccaacaagcctggattgtgaaggtattaagaatcggtctgtgggctactgagtgggtccttaggatactggcccagattttgccactgggtatggcagatcattttctaccatggcctgctgctcttgtagtggacttcctgagtccaatcccacctcctggtgtagaatttacactgctgcacctgaggtcgatgtttcaaagtaagatcaagccagtgttttgatctgggctctgagcacaagtcaggaaacaccaacatattcacactctcccagtaggttcctcagtccgatggtgaatggctattcgtaaatggctggtctggctctttggtgttggagcctttccaatagccccatgaaaagaagcatcacccaaggatattgtaaaaaggatgtaacaaggagatagggtagacattgtactcagtgggccttgggncctagcccagctctgagcagaggactgtggcattcactgtccttgagtgtttcaccttcttggataacacacgggccttctcttctggatttcatcagagattacagccagatgggggctgaagaccatcctcttgaccacagaggtgtgactgtgggaattcctcccaatttatggtttcccagaaaatcttagttccttttatttatagaatgcatgtcttttgtgttaagaaaccaaagagaaataaagagaacactcctaataaaaaaaaaa

SEQ ID NO: 229 - DNA, 729 bp, Homo sapiens
atgatgccgtgtcagagagcaaagctcctgtccttttggcctaatttggtgatgctgttcttgggtctaccacacctccttttgccctccgcaggagcctgtgttggaagagatggtgatgggcctgggcgttttgttgttggtcttcgtgctgggtctgggtctgaccccaccgaccctggctcaggataactccaggtacacacacttcctgacccagcactatgatgccaaaccacagggccgggatgacagatactgtgaaagcatcatgaggagacggggcctgacctcaccctgcaaagacatcaacacatttattcatggcaacaagcgcagcatcaaggccatctgtgaaaacaagaatggaaaccctcacagagaaaacctaagaataagcaagtcttctttccaggtcaccacttgcaagctacatggaggttccccctggcctccatgccagtaccgagccacagcggggttcagaaacgttgttgttgcttgtgaaaatggcttacctgtccacttggatcagtcaattttccgtcgtccgtaaccagcgggcccctggtcaagtgctggctctgctgtccttgccttccatttcccctctgcacccagaacagtggtggcaacattcattgccaagggcccaaagaaagagctacctggaccttttgttttctgtttgacaacatgtttaataaataaaaatgtcttgatatcagt

SEQ ID NO: 230 - DNA, 523 bp, Homo sapiens
ggctgcctggcaagagtgcagaagctctgtaccccagagaatatcaactgcagagacacccagggcagaaattcaacccctctgcacctggcagcaggctataataacctggaagtagctgaatatcttctagagcatggagctgatgttaatgcccaggacaagggtggtttaattcctcttcataatgcggcatcttatgggtagtaaaagttggattccaagacctcctttccagcttgttgtaatgattaaatgagaccatgcatgtggaaattgcattaactaatgtaaggcattataaaaatgcaagcatgttgacatagcggctttattgataaaatacaacacgtgtgtaaatgcaacagataagtgggcgtttactcccctccatgaagcagcccagaaaggaaggacgcagctgtgcgccctcctcctagcgcatggtgcagaccccaccatgaagaaccaggaaggccagacgcctctggatctggcaacagctgacgatatcagagctttg

SEQ ID NO: 231 - DNA, 1364 bp, Homo sapiens
aaaatcaggaacttgtgctggccctgcaatgtcaagggagggggctcacccagggctcctgtagctcagggggcaggcctgagccctgcacccgccccacgaccgtccagcccctgacgggcaccccatcctgaggggctctgcattggcccccaccgaggcaggggatctgaccgactcggagcccggctggatgttacaggcgtgcaaaatggaagggtttcccctcgtcccccctccatcagaagacctggtgccctatgacacggatctataccaacgccaaacgcacgagtattacccctatctcagcagtgatggggagagccatagcgaccattactgggacttccacccccaccacgtgcacagcgagttcgagagcttcgccgagaacaacttcacggagctccagagcgtgcagcccccgcagctgcagcagctctaccgccacatggagctggagcagatgcacgtcctcgatacccccatggtgccaccccatcccagtcttggccaccaggtctcctacctgccccggatgtgcctccagtacccatccctgtccccagcccagcccagctcagatgaggaggagggcgagcggcagagccccccactggaggtgtctgacggcgaggcggatggcctggagcccgggcctgggctcctgcctggggagacaggcagcaagaagaagatccgcctgtaccagttcctgttggacctgctccgcagcggcgacatgaaggacagcatctggtgggtggacaaggacaagggcaccttccagttctcgtccaagcacaaggaggcgctggcgcaccgctggggcatccagaagggcaaccgcaagaagatgacctaccagaagatggcgcgcgcgctgcgcaactacggcaagacgggcgaggtcaagaaggtgaagaagaagctcacctaccagttcagcggcgaagtgctgggccgcgggggcctggccgagcggcgccacccgccccactgagcccgcagcccccgccggccccgccaggcctccccgctggccatagcattaagccctcgcccggcccggacacagggaggacgctcccggggcccagaggcaggactgtggcgggccgggctccgtcacccgcccctccccccactccaggccccctccacatcccgcttcgcctccctccaggactccaccccggctcccgacgccagctgggcgtcagacccaccggcaaccttgcagaggacgacccggggtactgccttgggagtctcaagtccgtatgtaaatcagatctcccctctcacccctcccacccattaacctcctcccaaaaaacaagtaaagttattctcaatcc

SEQ ID NO: 232 - DNA, 4114 bp, Homo sapiens
attaattctggctccacttgttgctcggcccaggttggggagaggacggagggtggccgcagcgggttcctgagtgaattacccaggagggactgagcacagcaccaactagagaggggtcagggggtgcgggactcgagcgagcaggaaggaggcagcgcctggcaccagggctttgactcaacagaattgagacacgtttgtaatcgctggcgtgccccgcgcacaggatcccagcgaaaatcagatttcctggtgaggttgcgtgggtggattaatttggaaaaagaaactgcctatatcttgccatcaaaaaactcacggaggagaagcgcagtcaatcaacagtaaacttaagagacccccgatgctcccctggtttaacttgtatgcttgaaaattatctgagagggaataaacatcttttccttcttccctctccagaagtccattggaatattaagcccaggagttgctttggggatggctggaagtgcaatgtcttccaagttcttcctagtggctttggccatatttttctccttcgcccaggttgtaattgaagccaattcttggtggtcgctaggtatgaataaccctgttcagatgtcagaagtatatattataggagcacagcctctctgcagccaactggcaggactttctcaaggacagaagaaactgtgccacttgtatcaggaccacatgcagtacatcggagaaggcgcgaagacaggcatcaaagaatgccagtatcaattccgacatcgacggtggaactgcagcactgtggataacacctctgtttttggcagggtgatgcagataggcagccgcgagacggccttcacatacgccgtgagcgcagcaggggtggtgaacgccatgagccgggcgtgccgcgagggcgagctgtccacctgcggctgcagccgcgccgcgcgccccaaggacctgccgcgggactggctctggggcggctgcggcgacaacatcgactatggctaccgctttgccaaggagttcgtggacgcccgcgagcgggagcgcatccacgccaagggctcctacgagagtgctcgcatcctcatgaacctgcacaacaacgaggccggccgcaggacggtgtacaacctggctgatgtggcctgcaagtgccatggggtgtccggctcatgtagcctgaagacatgctggctgcagctggcagacttccgcaaggtgggtgatgccctgaaggagaagtacgacagcgcggcggccatgcggctcaacagccggggcaagttggtacaggtcaacagccgcttcaactcgcccaccacacaagacctggtctacatcgaccccagccctgactactgcgtgcgcaatgagagcaccggctcgctgggcacgcagggccgcctgtgcaacaagacgtcggagggcatggatggctgcgagctcatgtgctgcggccgtgggtacgaccagttcaagaccgtgcagacggagcgctgccactgcaagttccactggtgctgctacgtcaagtgcaagaagtgcacggagatcgtggaccagtttgtgtgcaagtagtgggtgccacccagcactcagccccgctcccaggacccgcttatttatagaaagtacagtgattctggtttttggtttttagaaatattttttatttttccccaagaattgcaaccggaaccattttttttcctgttaccatctaagaactctgtggtttattattaatattataattattatttggcaataatgggggtgggaaccacgaaaaatatttattttgtggatctttgaaaaggtaatacaagacttcttttggatagtatagaatgaagggggaaataacacataccctaacttagctgtgtgggacatggtacacatccagaaggtaaagaaatacattttctttttctcaaatatgccatcatatgggatgggtaggttccagttgaaagagggtggtagaaatctattcacaattcagcttctatgaccaaaatgagttgtaaattctctggtgcaagataaaaggtcttgggaaaacaaaacaaaacaaaacaaacctcccttccccagcagggctgctagcttgctttctgcattttcaaaatgataatttacaatggaaggacaagaatgtcatattctcaaggaaaaaaggtatatcacatgtctcattctcctcaaatattccatttgcagacagaccgtcatattctaatagctcatgaaatttgggcagcagggaggaaagtccccagaaattaaaaaatttaaaactcttatgtcaagatgttgatttgaagctgttataagaattgggattccagatttgtaaaaagacccccaatgattctggacactagattttttgtttggggaggttggcttgaacataaatgaaatatcctgtattttcttagggatacttggttagtaaattataatagtagaaataatacatgaatcccattcacaggtttctcagcccaagcaacaaggtaattgcgtgccattcagcactgcaccagagcagacaacctatttgaggaaaaacagtgaaatccaccttcctcttcacactgagccctctctgattcctccgtgttgtgatgtgatgctggccacgtttccaaacggcagctccactgggtcccctttggttgtaggacaggaaatgaaacattaggagctctgcttggaaaacagttcactacttagggatttttgtttcctaaaacttttattttgaggagcagtagttttctatgttttaatgacagaacttggctaatggaattcacagaggtgttgcagcgtatcactgttatgatcctgtgtttagattatccactcatgcttctcctattgtactgcaggtgtaccttaaaactgttcccagtgtacttgaacagttgcatttataaggggggaaatgtggtttaatggtgcctgatatctcaaagtcttttgtacataacatatatatatatatacatatatataaatataaatataaatatatctcattgcagccagtgatttagatttacagcttactctggggttatctctctgtctagagcattgttgtccttcactgcagtccagttgggattattccaaaagttttttgagtcttgagcttgggctgtggccccgctgtgatcataccctgagcacgacgaagcaacctcgtttctgaggaagaagcttgagttctgactcactgaaatgcgtgttgggttgaagatatctttttttcttttctgcctcacccctttgtctccaacctccatttctgttcactttgtggagagggcattacttgttcgttatagacatggacgttaagagatattcaaaactcagaagcatcagcaatgtttctcttttcttagttcattctgcagaatggaaacccatgcctattagaaatgacagtacttattaattgagtccctaaggaatattcagcccactacatagatagctttttttttttttttttttttttaataaggacacctctttccaaacaggccatcaaatatgttcttatctcagacttacgttgttttaaaagtttggaaagatacacatcttttcatacccccccttaggaggttgggctttcatatcacctcagccaactgtggctcttaatttattgcataatgatatccacatcagccaactgtggctctttaatttattgcataatgatattcacatcccctcagttgcagtgaattgtgagcaaaagatcttgaaagcaaaaagcactaattagtttaaaatgtcacttttttggtttttattatacaaaaaccatgaagtactttttttatttgctaaatcagattgttcctttttagtgactcatgtttatgaagagagttgagtttaacaatcctagcttttaaaagaaactatttaatgtaaaatattctacatgtcattcagatattatgtatatcttctagcctttattctgtacttttaatgtacatatttctgtcttgcgtgatttgtatatttcactggtttaaaaaacaaacatcgaaaggcttattccaaatggaag

SEQ ID NO: 233 - DNA, 3899 bp, Homo sapiens
ctgacgcgcggctgcggggcggagagctgcggctggcccagcgcgcccacctgaggaggcggcggggtccgcaggcgtcgcgggacgaggagatcggagccgggagactcgcgcagcgccatggcccccattggcctcaaagctgttgtcggagagaagattatgcatgatgtgataaagaaggtcaagaagaagggggaatggaaggtgctggtggtggatcagttaagcatgaggatgctgtcctcctgctgcaagatgacagacatcatgaccgagggcataacgattgtggaagatatcaataagcgcagagagccgctccccagcctggaggctgtgtatctcatcactccatccgagaagtccgtccactctctcatcagtgactttaaggacccgccgactgctaaataccgggctgcacacgtcttcttcactgactcttgtccagatgccctgtttaatgaactggtaaaatcccgagcagccaaagtcatcaaaactctgacggaaatcaatattgcatttctcccgtatgaatcccaggtctattccttggactctgctgactctttccaaagcttctacagtccccacaaggctcagatgaagaatcctatactggagcgcctggcagagcagatcgcgaccctttgtgccaccctgaaggagtacccggctgtgcggtatcggggggaatacaaggacaatgccctgctggctcagctaatccaggacaagctcgatgcctataaagctgatgatccaacaatgggggagggcccagacaaggcacgctcccagctcctgatcctggatcgaggctttgaccccagctcccctgtgctccatgaattgacttttcaggctatgagttatgatctgctgcctatcgaaaatgatgtatacaagtatgagaccagcggcatcggggaggcacgggtgaaggaggtgctcctggacgaggacgacgacctgtggatagcactgcgccacaagcacatcgcagaggtgtcccaggaagtcacccggtctctgaaagatttttcttctagcaagagaatgaatactggagagaagaccaccatgcgggacctgtcccagatgctgaagaagatgcctcagtaccagaaagagctcagcaagtactccacccacctgcaccttgctgaggactgtatgaagcattaccaaggcaccgtagacaaactctgccgagtggagcaggacctggccatgggcacagatgctgagggagagaagatcaaggaccctatgcgagccatcgtccccattctgctggatgccaatgtcagcacttatgacaaaatccgcatcatccttctctacatctttttgaagaatggcatcacggaggaaaacctgaacaaactgatccagcacgcccagatacccccggaggatagtgagatcatcaccaacatggctcacctcggcgtgcccatcgtcaccgattccacgctgcgtcgccggagcaagccggagcggaaggaacgcatcagcgagcagacctaccagctctcacggtggactccgattatcaaggacatcatggaggacactattgaggacaaacttgacaccaaacactacccttatatctctacccgttcctctgcctccttcagcaccaccgccgtcagcgcccgctatgggcactggcataagaacaaggccccaggcgagtaccgcagtggcccccgcctcatcattttcatccttgggggtgtgagcctgaatgagatgcgctgcgcctacgaggtgacccaggccaacggaaagtgggaggtgctgataggttctactcacattcttactcccaccaaatttctcatggacctgagacaccccgacttcagggagtcctctagggtatcttttgaggatcaggctccaacaatggagtgagagccaaagaaacaaagatccacacacatcctcaccccacagaaactgctggacacactgaagaaactgaataaaacagatgaagaaataagcagttaaaaaaataagtcgcccctccaaaacacgcccccatcccacagcgctccgcagcttcccaccaccgcccgcctcagttcctttgcgtctgttgcctccccagccctgcacgccctggctggcactgttgccgctgcattctcgtgttcagtgatgccctcttcttgtttgaaacaaaagaaaataatgcattgtgttttttaaaaagagtatcttatacatgtatcctaaaaagagaagctcatgtgcaattggtgcacagcaggagaaatttctggactgttaggatgaatggacgccttctccccgttatttaagatttgtgaccttgtacataaccctgggtgacgtgcacattgcttgggtatggaacggtagaaatttgggtgtttttaaaaccttgtttggggttgttcctgtccttgttgagaatcatagagatgtctgtgttcttggagtatttcacactgaggactaatctgctatcttcattccagtccctacccctcagtgcctgctctcatccaaataacctgggaggtgacaatcaggatatctcaggaggtccaaggtggaacagacctctttgcctttcccagcgtctcatacccccggtagtgcagctgtgggtggaggctggggtgtctgcacgaagtcaggccagcgtcctcctccacagcctgtcactgccccctccccagcctgtgtccacagtgctgtgatcccgagggaagtcctccagtctaagtcacagtgccctgacaggtgagaagcaaactcccgctggaagcctccatctctttggaaaaacagttagtctggagcctgtggcccaggcccttctgtccccaggcatcatcccaacagctcattttccctagtccgccttcgttcaagggtcaggaatggaccagaacagatgggttctggaggcccctgaacagagggctatggctgtggagaaggttcttggcccgttggactcacacagaccctgtaccctctcggcaagcatcttcagtcagattatcctcagtttcagatacttcataataccttgtgttgtgtggggtcatacatcatcgtgtttgtaagagaagatggtcattttattctctgtataaaacttagctctaaagcagaaactaaagcagcaaatgcaggaaggctgtctcgccatcctcaagactcagcagctctcattctccagtggtgagcacaccatttgtgctgctgctgttgtcgtgaaatataataacagtggaagtcacaaaaatgtcccctgcccagccccctcgccgcccttgacctcctgcaggccatgtgtgtattacttgtctagtgatgtcctctcaaagtgctgtacgcgagctcggcgccacctccgcctccctttcagagcctgctccccgccctctctgctcgctgcattgtggtgttctcttctcaaggctttgaaatctccccttgcactgagattagtcgtcagatctctccccgtctccctcccaacttatacgacctgatttccttaggacggaaccgcaggcacctgcgccgggcgtcttactcccgctgcttgttctgtcccctccctcggaccaaacagtgctcatgcttcaggaccttgtttgtcgaagatgttggtttccctttctctgttatttatataaaaataatttatcaaaaggatattttaaaaaagctagtctgtcttgaaacttgtttaccttaaaattatcagaatctcagtgtttgaaagtactgaagcacaaacatatatcatctctgtaccattctgtactaaagcacttgagtctaataaataaagaaatcagcaccccttcccggtgtccagggggaaaaaaaaa

SEQ ID NO: 234 - DNA, 1241 bp, Homo sapiens
  misc_feature (1029)..(1029): n is a, c, g, or t
  misc_feature (1066)..(1067): n is a, c, g, or t
  misc_feature (1069)..(1069): n is a, c, g, or t
atggcgtctgcggcagcagcggaggccgagaagggatctccagttgtggtgggcctgctagttgtgggcaatatcattattctgctgtcaggcctgtccctgtttgctgagaccatatgggtgacagccgaccagtaccgtgtatacccactgatgggagtctcaggcaaggatgacgtcttcgctggtgcctggattgccatcttctgcggcttctccttcttcatggtagccagttttggtgtgggtgccgcactctgccgccgccggtccatggtcctcacgtacctggtgctcatgctcatcgtctacatcttcgagtgcgcctcctgcatcacgtcctacacccaccgtgactacatggtgtccaacccatccctgatcaccaagcagatgctgaccttctacagcgcggacaccgaccagggccaggagctgacccgcctctgggaccgcgtcatgattgagcaagaatgctgtggcacatctggtcccatggactgggtgaacttcacgtcagccttccgggcggccactccggaggtggtgttcccctggcccccactgtgctgtcgccggacgggaaacttcatccccctcaacgaggagggctgccgcctggggcacatggactacctgttcaccaagggctgcttcgaacacatcggccacgccatcgacagctacacgtggggtatctcgtggtttgggtttgccatcctgatgtggacgctcccggtcatgctgatagccatgtatttctacaccatgctctgagggacaggaggggaaggcaacatacacaccccggactcctccgcatcctcctcctgcttcctccgctgggcctggatggctgcctcacctctcacctcccaacgtccctagcccttacgtccttccacttccaagatctttttccaggttcctgagccctactgtgtctcaggtgtgccctgaaaccccagggcttgtgtgcacatatccttagcccatctttcaagggacctctccatgatcccacctccnattcacagatacctctcttgtagctctctgacctccnncntcatggcaggcatcgccattcttgctgaaccgtttgtgattgccatttgagctctggaagcctctattgccatgagagttctgtcacggtcactttactgtccccatcatcacccagcacggggctaagcatatactagatagtcaataaataaataaataatgaatgaaaa

SEQ ID NO: 235 - DNA, 1539 bp, Homo sapiens
ggaattccgggcccggtctttcctcccgccgccgccggcctggtcccggggactggcctccacgtccgactcgtccgagctgaagcccagcagcactttgctgccagccgcgggggcggcggaggcgcccccgggccctcccaggaggctctctgggccagaggccgagattcggcacaggcccccaggagtccgtaagtaggagaggtcgcccgagaccggccggacccccatccccgcggccgccgccgccgctggtcccgcggctgcgaccgtggcggctgccgctggaaaatgtctcaggagaggcccacgttctaccggcaggagctgaacaagacaatctgggaggtgcccgagcgttaccagaacctgtctccagtgggctctggcgcctatggctctgtgtgtgctgcttttgacacaaaaacggggttacgtgtggcagtgaagaagctctccagaccatttcagtccatcattcatgcgaaaagaacctacagagaactgcggttacttaaacatatgaaacatgaaaatgtgattggtctgttggacgtttttacacctgcaaggtctctggaggaattcaatgatgtgtatctggtgacccatctcatgggggcagatctgaacaacattgtgaaatgtcagaagcttacagatgaccatgttcagttccttatctaccaaattctccgaggtctaaagtatatacattcagctgacataattcacagggacctaaaacctagtaatctagctgtgaatgaagactgtgagctgaagattctggattttggactggctcggcacacagatgatgaaatgacaggctacgtggccactaggtggtacagggctcctgagatcatgctgaactggatgcattacaaccagacagttgatatttggtcagtgggatgcataatggccgagctgttgactggaagaacattgtttcctggtacagaccatattgatcagttgaagctcattttaagactcgttggaaccccaggggctgagcttttgaagaaaatctcctcagagtctgcaagaaactatattcagtctttgactcagatgccgaagatgaactttgcgaatgtatttattggtgccaatcccctggctgtcgacttgctggagaagatgcttgtattggactcagataagagaattacagcggcccaagcccttgcacatgcctactttgctcagtaccacgatcctgatgatgaaccagtggccgatccttatgatcagtcctttgaaagcagggacctccttatagatgagtggaaaagcctgacctatgatgaagtcatcagctttgtgccaccaccccttgaccaagaagagatggagtcctgagcacctggtttctgttctgttgatcccacttcactgtgaggggaaggccttttcacgggaactctccaaatattattcaagtgcctcttgttgcagagatttcctccatggtggaagggggtgtgcgtgcgtgtgcgtgcgtgttagtgtgtgtgcatgtgt

SEQ ID NO: 236 - DNA, 951 bp, Homo sapiens
atggttaaccaaagctcccccatgggcttcctccttctgggcttctctgaacacccagcactggaaaggactctctttgtggttgtcttcacttcctacctcttgaccctggtgggcaacacactcatcatcctgctgtctgtactgtaccccaggctccactctccaatgtactttttcctctctgacctctccttcttggacctctgctttaccacaagttgtgtcccccagatgctggtcaacctctggggcccaaagaagaccatcagcttcctgggatgctctgtccagctcttcatcttcctgtccctggggaccactgagtgcatcctcctgacagtgatggcctttgaccgatacgtggctgtctgccagcccctccactatgccaccatcatccacccccgcctgtgctggcagctggcatctgtggcctgggttatgagtctggttcaatcgatagtccagacaccatccaccctccacttgcccttctgtccccaccagcagatagatgactttttatgtgaggtcccatctctgattcgactctcctgtggagatacctcctacaatgaaatccagttggctgtgtccagtgtcatcttcgtggttgtgcctctcagcctcatccttgcctcttatggagccactgcccaggcagtgctgaggattaactctgccacagcatggagaaaggcctttgggacctgctcctcccatctcactgtggtcaccctcttctacagctcagtcattgctgtctacctccagcccaaaaatccgtatgcccaagggaggggcaagttctttggtctcttctatgcagtgggcactccttcacttaaccctctcgtatacaccctgaggaacaaggagataaagcgagcactcaggaggttactagggaaggaaagagactccagggaaagctggagagctgcttaa

SEQ ID NO: 237 - DNA, 1698 bp, Homo sapiens
cggcggggatcaactttgcatgaataatgtgagtgcgcttggaaaagagacctcctgctccgcgggctcggggcaagagcccgcaggctaccttccccgggcaggggcgctcaacccaaccggctccagggcactggtaatttggctagaggaccgcgcggaggcagcgggatctgcgatttccttctggttggctgtcctgcgtgggtgccaagttccacacatgatttaatgaataagaaggagatgtcagtgaaaaaagggatccagaatgattactaacctataacccccaacagtatgacagaaaatggccttacagcttgggacaaaccgaagcactgtccagaccgagaacacgactggaagctagtaggaatgtctgaagcctgcctacataggaagagccattcagagaggcgcagcacgttgaaaaatgaacagtcgtcgccacatctcatccagaccacttggactagctcaatattccatctggaccatgatgatgtgaacgaccagagtgtctcaagtgcccagaccttccaaacggaggagaagaaatgtaaagggtacatccccagttacttagacaaggacgagctctgtgtagtgtgtggtgacaaagccaccgggtatcactaccgctgtatcacgtgtgaaggctgcaagggtttctttagaagaaccattcagaaaaatctccatccatcctattcctgtaaatatgaaggaaaatgtgtcatagacaaagtcacgcgaaatcagtgccaggaatgtcgctttaagaaatgcatctatgttggcatggcaacagatttggtgctggatgacagcaagaggctggccaagaggaagctgatagaggagaaccgggagaaaagacggcgggaagagctgcagaagtccatcgggcacaagccagagcccacagacgaggaatgggagctcatcaaaactgtcaccgaagcccatgtggcgaccaacgcccaaggcagccactggaagcaaaaaccgaaatttctgccagaagacattggacaagcaccaatagtcaatgccccagaaggtggaaaggttgacttggaagccttcagccattttacaaaaatcatcacaccagcaattaccagagtggtggattttgccaaaaagttgcctatgttttgtgagctgccatgtgaagaccagatcatcctcctcaaaggctgctgcatggagatcatgtcccttcgcgctgctgtgcgctatgacccggaaagtgagactttaaccttgaatggggaaatggcagtgatacggggccagctgaaaaatgggggtcttggggtggtgtcagacgccatctttgacctaggcatgtctctgtcttctttcaacctggatgacactgaagtagccctccttcaggccgtcctgctgatgtcttcagatcgcccggggcttgcctgtgttgagagaatagaaaagtaccaagatagtttcctgctggcctttgaacactatatcaattaccgaaaacaccacgtgacacacttttggccaaaactcctgatgaaggtgacagatctgcggatgataggagcctgccatgccagccgcttcctgcacatgaaggtggaatgccccacagaactcctcccccctttgttcctggaagtgttcgaggattagactgactggattccttcctataattcc

SEQ ID NO: 238 - DNA, 1432 bp, Homo sapiens
gcgatagctgagtggcggcggctgctgattgtgttctaggggacggagtaggggaagacgtttgctctcccggaacagcctatctcattcctttctttcgattacccgtggcgcggagagtcagggcggcggctgcggcagcaagggcggcggtggcggcggcggcagctgcagtgacatgtccagcatgaatcccgaatatgattatttattcaagttacttctgattggcgactcaggggttggaaagtcttgccttcttcttaggtttgcagatgatacatatacagaaagctacatcagcacaattggtgtggatttcaaaataagaactatagagttagacgggaaaacaatcaagcttcaaatatgggacacagcaggccaggaaagatttcgaacaatcacctccagttattacagaggagcccatggcatcatagttgtgtatgatgtgacagatcaggagtccttcaataatgttaaacagtggctgcaggaaatagatcgttatgccagtgaaaatgtcaacaaattgttggtagggaacaaatgtgatctgaccacaaagaaagtagtagactacacaacagcgaaggaatttgctgattcccttggaattccgtttttggaaaccagtgctaagaatgcaacgaatgtagaacagtctttcatgacgatggcagctgagattaaaaagcgaatgggtcccggagcaacagctggtggtgctgagaagtccaatgttaaaattcagagcactccagtcaagcagtcaggtggaggttgctgctaaaatttgcctccatccttttctcacagcaatgaatttgcaatctgaacccaagtgaaaaaacaaaattgcctgaattgtactgtatgtagctgcactacaacagattcttaccgtctccacaaaggtcagagattgtaaatggtcaatactgactttttttttattcccttgactcaagacagctaacttcattttcagaactgttttaaacctttgtgtgctggtttataaaataatgtgtgtaatccttgttgctttcctgataccagactgtttcccgtggttggttagaatatattttgttttgatgtttatattggcatgtttagatgtcaggtttagtcttctgaagatgaagttcagccattttgtatcaaacagcacaagcagtgtctgtcactttccatgcataaagtttagtgagatgttatatgtaagatctgatttgctagttcttccttgtagagttataaatggaaagattacactatctgattaatagtttcttcatactctgcatataatttgtggctgcagaatattgtaatttgttgcacactatgtaacaaaacaactgaagatatgtttaataaatattgtacttattggaagtaaaaaaaaaaaaaaaaaaaaaaa

SEQ ID NO: 239 - DNA, 1752 bp, Homo sapiens
  misc_feature (533)..(533): n is a, c, g, or t
  misc_feature (546)..(546): n is a, c, g, or t
  misc_feature (901)..(901): n is a, c, g, or t
  misc_feature (983)..(983): n is a, c, g, or t
  misc_feature (993)..(993): n is a, c, g, or t
  misc_feature (1002)..(1002): n is a, c, g, or t
  misc_feature (1167)..(1167): n is a, c, g, or t
  misc_feature (1189)..(1189): n is a, c, g, or t
  misc_feature (1541)..(1541): n is a, c, g, or t
agaaaaggtaaggtgttgtgtcacaaagaggccccagtctctttcttcttacatccatgcctcttactagatgatacatttacagattgggcagtttgttctcaaaacctgggtgagaagactattcctggactctagcaacttcaaaactgaggctgggtttcagaatctttttctgcatcaattcagtcaatttgccttcaacaaagagaagtcagcaagttctatttatgctgaaagaactattccatgagaaaagcagagaaccccaaagtgggcaggcaaccccgacgagagcttatccctgtggcggcatcaggagtggctgtacattgaattttcaagtgctggttggctgtcgccagcccatggtaggaggggaggaatggcttaagatgaggtaagatctggtggtggggcatctttcctcaattccatactgactttgatcttgagaaagaaaaactggctatgcattacctaaaaccagtccaaaatgaaacagaccaacacacacacaaaagcaaattgtncaatccctttggnaattaagggaagcagcataaggtttttctttttggaaaaaatgcatttattttctttttctccaacagcaagaatcttttgttttcattttgcacgtgaccttatcttggaaactcttatacccaattgcctcccctcctattattcagagcttccctgtctttttacttgaagacaaataagtttgagcacttgagtaaaacttcacaggtgtgtaagtaggaaggcaacattttcaaaaagagaccatatgatgagaacgcctaatgatcaccacatgcaaacaaacaaaactgccagtctcatttcccacatttcttacttaagagaagagaagtaaatgaaaggaagaagnaaatagatttgtaattaaagatgtggcaaaaaagatagggctgagccagttcaatttagccttcaggtgcagaatacttagnagtccaaagnaaatgtggnagtggacttaattagatgcagttgtctttatcctgaaagtagtgagctaagcctaatttccagcattttgaaagagattcctttttgtttctttccatggtgccctctttaaggcacagagttgctccacaccactgggtggagaaagaaagattgcgaaccctngaccatccttttgaggctacantctatgttatttggcagatttataaagctatcagtaataacaatgctatgtactgcaagctgcccttgtgttagttaaagggagcatttttaatcgttcggaaattttcgtgacatgtcaagtgcagttgtgaggactgtgtgggtgaacgaaaatgtgtctgtcaagttcagagtcctttagatttaaaaaaaaattatgacttatcaatggtgccgttatagctgtgtcagacaatgggtgtgcccattctcacaattatccttcaaaaaaaatctatgttcaaatgctttaaaaatttatcacacgatacaagagtatgactttgtcagccttctagagttcttttttncttttattttctttcgtattttttccttcaaaaaatcaatgaagacttgatttctgtcaataattgtatcaagggtgaatatactacctgaattttgtgcatgttacattgtagttgtaaccttttctaattcaggatgaatacgagatggttgtgattgtgcagtgtaccaataaagttcgagaaatttgtaaaaaaaaaaaaaaaaaaa

SEQ ID NO: 240 - DNA, 1366 bp, Homo sapiens
cgcagaactcagagctgctcttcctctgtggccagttggggaccagcatcatgaagtggatggtggtggtcttggtctgcctccagctcttggaggcagcagtggtcaaagtgcccctgaagaaatttaagtctatccgtgagaccatgaaggagaagggcttgctgggggagttcctgaggacccacaagtatgatcctgcttggaagtaccgctttggtgacctcagcgtgacctacgagcccatggcctacatggatgctgcctactttggtgagatcagcatcgggactccaccccagaacttcctggtcctttttgacaccggctcctccaacttgtgggtgccctctgtctactgccagagccaggcctgcaccagtcactcccgcttcaaccccagcgagtcgtccacctactccaccaatgggcagaccttctccctgcagtatggcagtggcagcctcaccggcttctttggctatgacaccctgactgtccagagcatccaggtccccaaccaggagttcggcttgagtgagaatgagcctggtaccaacttcgtctatgcgcagtttgatggcatcatgggcctggcctaccctgctctgtccgtggatgaggccaccacagctatgcagggcatggtgcaggagggcgccctcaccagccccgtcttcagcgtctacctcagcaaccagcagggctccagcgggggagcggttgtctttgggggtgtggatagcagcctgtacacggggcagatctactgggcgcctgtcacccaggaactctactggcagattggcattgaagagttcctcatcggcggccaggcctccggctggtgttctgagggttgccaggccatcgtggacacaggcacctctctgctaactgtgccccagcagtacatgagtgctcttctgcaggccacaggggcccaggaggatgagtatggacagtttctcgtgaactgtaacagcattcagaatctgcccagcttgaccttcatcatcaatggtgtggagttccctctgccaccttcctcctatatcctcagtaacaacggctactgcaccgtgggagtcgagcccacctacctgtcctcccagaacggccagcccctgtggatcctcggggatgtcttcctcaggtcctactattccgtctacgacttgggcaacaacagagtaggctttgccactgccgcctagacttgctgcctcgacacgtgggctcccctcttcctcttgaccctgcaccctcctagggcattgtatctgtctttccactctggattcagccttctttttctggactctggactttctctaataataaatagttcttctaaaaaaaaaaa

SEQ ID NO: 241 - DNA, 2877 bp, Homo sapiens
gtggcatccttccctttctaatcagagattttcttcctcagagattttggcctagatttgcaaaatgatgaccacatctttgatttgggggattgctatagcagcatgctgttgtctatggcttattcttggaattaggagaaggcaaacgggtgaaccacctctagagaatggattaattccatacctgggctgtgctctgcaatttggtgccaatcctcttgagttcctcagagcaaatcaaaggaaacatggtcatgtttttacctgcaaactaatgggaaaatatgtccatttcatcacaaatcccttgtcataccataaggtgttgtgccacggaaaatattttgattggaaaaaatttcactttgctacttctgcgaaggcatttgggcacagaagcattgacccgatggatggaaataccactgaaaacataaacgacactttcatcaaaaccctgcagggccatgccttgaattccctcacggaaagcatgatggaaaacctccaacgtatcatgagacctccagtctcctctaactcaaagaccgctgcctgggtgacagaagggatgtattctttctgctaccgagtgatgtttgaagctgggtatttaactatctttggcagagatcttacaaggcgggacacacagaaagcacatattctaaacaatcttgacaacttcaagcaattcgacaaagtctttccagccctggtagcaggcctccccattcacatgttcaggactgcgcacaatgcccgggagaaactggcagagagcttgaggcacgagaacctccaaaagagggaaagcatctcagaactgatcagcctgcgcatgtttctcaatgacactttgtccacctttgatgatctggagaaggccaagacacacctcgtggtcctctgggcatcgcaagcaaacaccattccagcgactttctggagtttatttcaaatgattaggaacccagaagcaatgaaagcagctactgaagaagtgaaaagaacattagagaatgctggtcaaaaagtcagcttggaaggcaatcctatttgtttgagtcaagcagaactgaatgacctgccagtattaaatagtataatcaaggaatcgctgaggctttccagtgcctccctcaacatccggacagctaaggaggatttcactttgcaccttgaggacggttcctacaacatccgaaaagatagcatcatagctctttacccacagttaatgcacttagatccagaaatctacccagaccctttgacttttaaatatgataggtatcttgatgaaaacgggaagacaaagactaccttctattgtaatggactcaagttaaagtattactacatgccctttggatcgggagctacaatatgtcctggaagattgttcgctatccacgaaatcaagcaatttttgattctgatgctttcttattttgaattggagcttatagagggccaagctaaatgtccacctttggaccagtcccgggcaggcttgggcattttgccgccattgaatgatattgaatttaaatataaattcaagcatttgtgaatacatggctggaataagaggacactagatgatattacaggactgcagaacaccctcaccacacagtccctttggacaaatgcatttagtggtggtagaaatgattcaccaggtccaatgttgttcaccagtgcttgcttgtgaatcttaacattttggtgacagtttccagatgctatcacagactctgctagtgaaaagaactagtttctaggagcacaataatttgttttcatttgtataagtccatgaatgttcatatagccagggattgaagtttattattttcaaaggaaaacacctttattttattttttttcaaaatgaagatacacattacagccaggtgtggtagcaggcacctgtagtcttagctactcgagaggccaaagaaggaggatggcttgagcccaggagttcaagaccagcctggacagcttagtgagatcccgtctccgaagaaaagatatgtattctaattggcagattgttttttcctaaggaaactgctttatttttataaaactgcctgacaattatgaaaaaatgttcaaattcacgttctagtgaaactgcattatttgttgactagatggtggggttcttcgggtgtgatcatatatcataaaggatatttcaaatgattatgattagttatgtcttttaataaaaaggaaatatttttcaacttcttctatatccaaaattcagggctttaaacatgattatcttgatttcccaaaaacactaaaggtggttttattttcccttcatgttttaacttattgttgctgaaaactctatgtccggctttaactatcttctctatatttttatttcattcacattaatgagaagagttttctcagagattaaaaaaggtagtttttctgtcattgttaaatacacattatcactgaaaaaatgtagcttttatgatgtatgttttaaagttaaaactggatggaaatagccatttggaagctttggttatgaaacatgtggagtgtattaagtgcagcttgacattatgttttatttaaatgctttttatcgctaaatgacttgcagatgaaaaaaactaaggtgactcgagtgtttaaatgcctgtgtacaacaatgctttgataaaatattttaaggtatgagttatcagctctatgtcaattgatatttctgtgtagtatttatatttaaattatatttacctttttgcttattttacaaatattaagaaaatattctaacatttgataattttgaaatgattcatctttcagaaataaaagtatgaatct

SEQ ID NO: 242 - DNA, 1613 bp, Homo sapiens
atcctgacttccgctttggaggcgaggacccgagcgagtgtagggggtgcggcgtctggtcagccaggggtgaattctcaggactggtcggcagtcaagccatcatgcctcgtggtcagaagagtaagctccgtgcccgtgagaaacgccgcaaggcccgagatgagacccggggtctcaatgttcctcaggtcactgaagcagaggaagaagaggccccctgctgttcctcttctgtttctgggggtgctgcttcaagctctcctgctgctggcattccccagaagcctcagagagccccaaccactgccgctgctgcggctgcgggtgtttcatccacaaaatctaaaaaaggtgccaagagccaccaaggtgagaaaaatgcaagttcctcccaggcctcaacatccactaagagcccaagcgaagatcctctaaccaggaagtcagggtcgttggtgcagttcctgttgtacaagtataaaataaaaaagtccgttacaaagggagaaatgctgaaaattgttggcaaaaggttcagggagcacttccctgagatcctcaagaaagcctctgagggcctcagtgttgtctttggccttgagctgaataaagtcaaccccaacggccacacttacaccttcatcgacaaggtagacctcactgatgaggaatccctgctcagttcctgggactttcccaggagaaagcttctgatgcctctcctgggtgtgatcttcttaaatggcaactcagctactgaggaagagatctgggaattcctgaatatgttgggagtctatgatggagaggagcactcagtctttggggaaccctggaagctcatcaccaaagatctggtgcaggaaaaatatctggagtacaagcaggtgcccagcagtgatcccccacgctttcaattcctgtggggtccgagagcctatgctgaaaccagcaagatgaaagtcctggagtttttggccaaggtaaatggtaccaccccctgtgccttcccaacccattacgaagaagctttgaaagatgaagagaaagccggagtctgagccagagttgtagccaggccttgcactactgccatagccaatcaatctcccaaagccaagtttacctgctgttctcacccccaatgaggtcttaggcagattctttactttgtaattcaaaaggcctgttaacctttgttcttgttatgcatgaataacttgttgactttttttttttctctttttcaactagtgtttcaacaggtttatttagattcagaatgtaaatttacaaatgatatagatcaccctgttattgctgtttttcagggacagtagaaagtgttttgttttttgagtgaaacaacttattaataaaaatccttaaatcacttttgtaatccaggacaagaaaatgtggcattagagtagaaatatctttggaaatgtgaaagaccccatagtgaaatatttgggatcagaagccagaggtgtaaaagtggtcaattcttggtttacttcatttaatctttcttttcataaagatacatacctggatttgtttatgttattcaagaatgtgtgagaaattaaaccatagttagttaa

SEQ ID NO: 243 - DNA, 1925 bp, Homo sapiens
ggtccattcgggaattactgcccagcagccgactaagttgcattccttgaatcttcgcagaaaagacaattcttttaatcagagttagtaatgtggacagtacaaaatcgagagagtctggggcttctctctttccctgtgatgattaccatggtctgttgtgcacacagcaccaatgaacccagcaacatgccatacgtgaaagagacagtggacagattgctcaaaggatatgacattcgcttgcggccggacttcggagggccccccgtcgacgttgggatgcggatcgatgtcgccagcatagacatggtctccgaagtgaatatggattatacactcaccatgtatttccagcagtcttggaaagacaaaaggctttcttattctggaatcccactgaacctcaccctagacaatagggtagctgaccaactctgggtaccagacacctactttctgaatgacaagaaatcatttgtgcatggggtcacagtgaaaaatcgaatgattcgactgcatcctgatggaacagttctctatggactccgaatcacaaccacagctgcatgtatgatggatcttcgaagatatccactggatgagcagaactgcaccctggagatcgaaagttatggctataccactgatgacattgaattttactggaatggaggagaaggggcagtcactggtgttaataaaatcgaacttcctcaattttcaattgttgactacaagatggtgtctaagaaggtggagttcacaacaggagcgtatccacgactgtcactaagttttcgtctaaagagaaacattggttacttcattttgcaaacctacatgccttctacactgattacaattctgtcctgggtgtctttttggatcaactatgatgcatctgcagccagagtcgcactaggaatcacgacggtgcttacaatgacaaccatcagcacccacctcagggagaccctgccaaagatcccttatgtcaaagcgattgatatttatctgatgggttgctttgtgtttgtgttcctggctctgctggagtatgcctttgtaaattacatcttctttgggaaaggccctcagaaaaagggagctagcaaacaagaccagagtgccaatgagaagaataaactggagatgaataaagtccaggtcgacgcccacggtaacattctcctcagcaccctggaaatccggaatgagacgagtggctcggaagtgctcacgagcgtgagcgaccccaaggccaccatgtactcctatgacagcgccagcatccagtaccgcaagcccctgagcagccgcgaggcctacgggcgcgccctggaccggcacggggtacccagcaaggggcgcatccgcaggcgtgcctcccagctcaaagtcaagatccccgacttgactgatgtgaattccatagacaagtggtcccgaatgtttttccccatcaccttttctctttttaatgtcgtctattggctttactatgtacactgaggtctgttctaatggttccatttagactactttcctcttctattgttttttaaccttacaggtccccaacagcgatactgctgtttctcgaggtaagagattcagccatccaattggttttaggtcttgcatatcagttttattactgcaccatgtttacttcaaaaagacaaaacaaaaaaaaaattatttttccagtctaccgtggtccaggttatcagctctttaagagctctattaattgccatgtttacaaacaaacacaaagagagaagttagacaggtagatctttagcagtcttttctagtttccctggatttcactgatttattttttagggaaaatgaaaagaggaccttgctgtccgcctgcactgcttcctggtaaactataacaaacttatgctgcc

SEQ ID NO: 244 - DNA, 1417 bp, Homo sapiens
agcgagctcttgcagcctccccgcccctcccgcaacgctcgaccccaggattcccccggctcgcctgcccgccatggccgacaaggaagcagccttcgacgacgcagtggaagaacgagtgatcaacgaggaatacaaaatatggaaaaagaacaccccttttctttatgatttggtgatgacccatgctctggagtggcccagcctaactgcccagtggcttccagatgtaaccagaccagaagggaaagatttcagcattcatcgacttgtcctggggacacacacatcggatgaacaaaaccatcttgttatagccagtgtgcagctccctaatgatgatgctcagtttgatgcgtcacactacgacagtgagaaaggagaatttggaggttttggttcagttagtggaaaaattgaaatagaaatcaagatcaaccatgaaggagaagtaaacagggcccgttatatgccccagaacccttgtatcatcgcaacaaagactccttccagtgatgttcttgtctttgactatacaaaacatccttctaaaccagatccttctggagagtgcaacccagacttgcgtctccgtggacatcagaaggaaggctatgggctttcttggaacccaaatctcagtgggcacttacttagtgcttcagatgaccataccatctgcctgtgggacatcagtgccgttccaaaggagggaaaagtggtagatgcgaagaccatctttacagggcatacggcagtagtagaagatgtttcctggcatctactccatgagtctctgtttgggtcagttgctgatgatcagaaacttatgatttgggatactcgttcaaacaatacttccaaaccaagccactcagttgatgctcacactgctgaagtgaactgcctttctttcaatccttatagtgagttcattcttgccacaggatcagctgacaagactgttgccttgtgggatctgagaaatctgaaacttaagttgcattcctttgagtcacataaggatgaaatattccaggttcagtggtcacctcacaatgagactattttagcttccagtggtactgatcgcagactgaatgtctgggatttaagtaaaattggagaggaacaatccccagaagatgcagaagacgggccaccagagttgttgtttattcatggtggtcatactgccaagatatctgatttctcctggaatcccaatgaaccttgggtgatttgttctgtatcagaagacaatatcatgcaagtgtggcaaatggagttagtccttgaccactagtttgatgccatctccattttgggtgacctgtttcaccagcaggcctgttactctccatgactaactgtgtaagtgcttaaaatggaataaattgcttttctacataacccc

SEQ ID NO: 245 - DNA, 3620 bp, Homo sapiens
aattcggcacgaggtgggactttcctctcgctgcctcccggctctgcccgcccttcgaaagtccagggtccctgcccgctaggcaagttgcactcatggcacctccaagtgaagagacgcccctgatccctcagcgttcatgcagcctcttgtccacggaggctggtgccctgcatgtgctgctgcccgctcggggccccgggcccccccagcgcctatctttctcctttggggaccacttggctgaggacctgtgcgtgcaggctgccaaggccagcggcatcctgcctgtgtaccactccctctttgctctggccacggaggacctgtcctgctggttccccccgagccacatcttctccgtggaggatgccagcacccaagtcctgctgtacaggattcgcttttacttccccaattggtttgggctggagaagtgccaccgcttcgggctacgcaaggatttggccagtgctatccttgacctgccagtcctggagcacctctttgcccagcaccgcagtgacctggtgagtgggcgcctccccgtgggcctcagtctcaaggagcagggtgagtgtctcagcctggccgtgttggacctggcccggatggcgcgagagcaggcccagcggccgggagagctgctgaagactgtcagctacaaggcctgcctacccccaagcctgcgcgacctgatccagggcctgagcttcgtgacgcggaggcgtattcggaggacggtgcgcagagccctgcgccgcgtggccgcctgccaggcagaccggcactcgctcatggccaagtacatcatggacctggagcggctggatccagccggggccgccgagaccttccacgtgggcctccctggggcccttggtggccacgacgggctggggctgctccgcgtggctggtgacggcggcatcgcctggacccagggagaacaggaggtcctccagcccttctgcgactttccagaaatcgtagacattagcatcaagcaggccccgcgcgttggcccggccggagagcaccgcctggtcactgttaccaggacagacaaccagattttagaggccgagttcccagggctgcccgaggctctgtcgttcgtggcgctcgtggacggctacttccggctgaccacggactcccagcacttcttctgcaaggaggtggcaccgccgaggctgctggaggaagtggccgagcagtgccacggccccatcactctggactttgccatcaacaagctcaagactgggggctcacgtcctggctcctatgttctccgccgcagcccccaggactttgacagcttcctcctcactgtctgtgtccagaacccccttggtcctgattataagggctgcctcatccggcgcagccccacaggaaccttccttctggttggcctcagccgaccccacagcagtcttcgagagctcctggcaacctgctgggatggggggctgcacgtagatggggtggcagtgaccctcacttcctgctgtatccccagacccaaagaaaagtccaacctgatcgtggtccagagaggtcacagcccacccacatcatccttggttcagccccaatcccaataccagctgagtcagatgacatttcacaagatccctgctgacagcctggagtggcatgagaacctgggccatgggtccttcaccaagatttaccggggctgtcgccatgaggtggtggatggggaggcccgaaagacagaggtgctgctgaaggtcatggatgccaagcacaagaactgcatggagtcattcctggaagcagcgagcttgatgagccaagtgtcgtaccggcatctcgtgctgctccacggcgtgtgcatggctggagacagcaccatggtgcaggaatttgtacacctgggggccatagacatatatctgcgaaaacgtggccacctggtgccagccagctggaagctgcaggtggtcaaacagctggcctacgccctcaactatctggaggacaaaggcctgccccatggcaatgtctctgcccggaaggtgctcctggctcgggagggggctgatgggagcccgcccttcatcaagctgagtgaccctggggtcagccccgctgtgttaagcctggagatgctcaccgacaggatcccctgggtggcccccgagtgtctccgggaggcgcagacacttagcttggaagctgacaagtggggcttcggcgccacggtctgggaagtgtttagtggcgtcaccatgcccatcagtgccctggatcctgctaagaaactccaattttatgaggaccggcagcagctgccggcccccaagtggacagagctggccctgctgattcaacagtgcatggcctatgagccggtccagaggccctccttccgagccgtcattcgtgacctcaatagcctcatctcttcagactatgagctcctctcagaccccacacctggtgccctggcacctcgtgatgggctgtggaatggtgcccagctctatgcctgccaagaccccacgatcttcgaggagagacacctcaagtacatctcacagctgggcaagggcaactttggcagcgtggagctgtgccgctatgacccgctaggcgacaatacaggtgccctggtggccgtgaaacagctgcagcacagcgggccagaccagcagagggactttcagcgggagattcagatcctcaaagcactgcacagtgatttcattgtcaagtatcgtggtgtcagctatggcccgggccgccagagcctgcggctggtcatggagtacctgcccagcggctgcttgcgcgacttcctgcagcggcaccgcgcgcgcctcgatgccagccgcctccttctctattcctcgcagatctgcaagggcatggagtacctgggctcccgccgctgcgtgcaccgcgacctggccgcccgaaacatcctcgtggagagcgaggcacacgtcaagatcgctgacttcggcctagctaagctgctgccgcttgacaaagactactacgtggtccgcgagccaggccagagccccattttctggtatgcccccgaatccctctcggacaacatcttctctcgccagtcagacgtctggagcttcggggtcgtcctgtacgagctcttcacctactgcgacaaaagctgcagcccctcggccgagttcctgcggatgatgggatgtgagcgggatgtccccgccctctgccgcctcttggaactgctggaggagggccagaggctgccggcgcctcctgcctgccctgctgaggtgagcgccgcagggctagcctcagtttcccagtctgtagattgggccggggtctcgggcaagccagctggcgcctgagtctctgtactgagaagaaaggctagagtgtgaggccgatgaggatcctggcccccacttggctactctctcactgtggcaagtcagagcactttcagagcctcagtttacccttttccaaaatgagaatagtaatgccttatagggtgagggaagattagactcctgttcacctgtgcctatgagggctcagctcaaagccgagcacacagtcgatgctccataaatggtggtgacgtt

SEQ ID NO: 246 - DNA, 3620 bp, Homo sapiens; identical to SEQ ID NO: 245

SEQ ID NO: 247 - DNA, 1799 bp, Homo sapiens
cgggcatcttcgttttctgcacagaaccacccccgccgcccgactttcttccccccagttactcatcgcgatatctatgttttaatgtctgtgttctctactaagattgttagctccataagacttgagactatgtctgttttggtctccatcatctaaccagcacagtacctggtacataattggcattcagtaagtatgaatgaaggaataaattaatacataattttagtagattagttaactgcccttctttcgtcattgttcagttgaagaatacctgctatccctccaaagtgtataaaaactcatgttgcaatgggtaccttatatttgacgaaaaaaaaaaaaaaaaattaacacgagctcatttcttgtactttgcggatgtgctaatttaacttgctcctttggatacttggcatctagcaagagaactacccccttggggggttgaggatttgagaaggcatcggggaggattatctcgaaactgactcactgctgaatgtgtgcttggtttctcccactaggaaaaacagtaccagttttactgtcatcttgcaacagcacacatatcagtgcttcagagatgatttggaaatttgatgtgaaagaataataagatcaagtctttattcaaaagttaatgcagtagctgcattttattcactgattataggcaaatcagtactttgcctactgtctgttttcttcatctcataagtaattgcaaaaatgagattttctggttgattagacttctgagccagtcctttgtaaatcacaccgctctccttttccttataatctttcattattaagagccactaattgtgtgtgtgtgttttttttgtctctgccccccccttttttttttttcatttttaggatctgcagaaaaggctgtcttggaacaatttggattccctttaactggaacagaggcaagggactacatggaaggttgtcttggcactgaacggagaaaggtcaaaaggaagataaaaagtttgttccagagaaggtgatgcagacagaaagcattgtaaatttaagcctgatcccaatatccctccaaccttcagtgccttcaatgaagattatgttggaagtgggtggtcacgaggacacatggctccagcaggaaataacaaattttcaagtaaagccatggctgaaaccttttacctttctaacattgtgcctcaggattttgataataattctggatattggaacagaatagaaatgtactgtcgagagctgacagaaaggtttgaagatgtttgggtggtatctgggcctttgaccttacctcagactagaggcgatggaaagaaaatagttagttaccaggtgattggcgaggacaacgtggcagtcccctcacacctttataaggaccatgctggctgctgtgttgagagcccgctggggacaaggaccagtgaggaggccactgcaagaatccaggagagagatgatggcggctcagaccagcgcagtggcctggttgaacttgggatatatttcgaaggtagagccaacaggatttccggccggattggatgtagggtgtgagaaacagagaggaggcaaggatgacgtcaagggttttggcctgagcagctggaaatccagccgggcacccccgtgggggctgttgagtggttttaactgtctcctggggcctgtgggtgaagctgagacagagaccgaagggaggggctgagccctacccctggctctgtggctcagggaataggctgcacatactgattattccattacccttt

SEQ ID NO: 248 - DNA, 1799 bp, Homo sapiens; identical to SEQ ID NO: 247

SEQ ID NO: 249 - DNA, 1321 bp, Homo sapiens
ggcacgaggttggtcccaggcagcagttagcccgccgcccgcctgtgtgtccccagagccatggagagagccagtctgatccagaaggccaagctggcagagcaggccgaacgctatgaggacatggcagccttcatgaaaggcgccgtggagaagggcgaggagctctcctgcgaagagcgaaacctgctctcagtagcctataagaacgtggtgggcggccagagggctgcctggagggtgctgtccagtattgagcagaaaagcaacgaggagggctcggaggagaaggggcccgaggtgcgtgagtaccgggagaaggtggagactgagctccagggcgtgtgcgacaccgtgctgggcctgctggacagccacctcatcaaggaggccggggacgccgagagccgggtcttctacctgaagatgaagggtgactactaccgctacctggccgaggtggccaccggtgacgacaagaagcgcatcattgactcagcccggtcagcctaccaggaggccatggacatcagcaagaaggagatgccgcccaccaaccccatccgcctgggcctggccctgaacttttccgtcttccactacgagatcgccaacagccccgaggaggccatctctctggccaagaccactttcgacgaggccatggctgatctgcacaccctcagcgaggactcctacaaagacagcaccctcatcatgcagctgctgcgagacaacctgacactgtggacggccgacaacgccggggaagaggggggcgaggctccccaggagccccagagctgagtgttgcccgccaccgccccgccctgccccctccagtcccccaccctgccgagaggactagtatggggtgggaggccccacccttctcccctaggcgctgttcttgctccaaagggctccgtggagagggactggcagagctgaggccacctggggctggggatcccactcttcttgcagctgttgagcgcacctaaccactggtcatgcccccacccctgctctccgcacccgcttcctcccgaccccaggaccaggctacttctcccctcctcttgcctccctcctgcccctgctgcctctgatcgtaggaattgaggagtgtcccgccttgtggctgagaactggacagtggcaggggctggagatgggtgtgtgtgtgtgtgtgtgtgtgtgtgtgtgcgcgcgcgccagtgcaagaccgagattgagggaaagcatgtctgctgggtgtgaccatgtttcctctcaataaagttcccctgtgacactcaaaaaaaaaaaaaaaaaaaaa

SEQ ID NO: 250 - DNA, 3416 bp, Homo sapiens
  misc_feature (1114)..(1114): n is a, c, g, or t
  misc_feature (1351)..(1351): n is a, c, g, or t
  misc_feature (1356)..(1356): n is a, c, g, or t
  misc_feature (1360)..(1360): n is a, c, g, or t
  misc_feature (1362)..(1363): n is a, c, g, or t
  misc_feature (1366)..(1367): n is a, c, g, or t
  misc_feature (1369)..(1384): n is a, c, g, or t
  misc_feature (1387)..(1389): n is a, c, g, or t
  misc_feature (1391)..(1398): n is a, c, g, or t
  misc_feature (1400)..(1404): n is a, c, g, or t
  misc_feature (1608)..(1610): n is a, c, g, or t
  misc_feature (1692)..(1693): n is a, c, g, or t
  misc_feature (1708)..(1708): n is a, c, g, or t
  misc_feature (1797)..(1797): n is a, c, g, or t
  misc_feature (1827)..(1827): n is a, c, g, or t
  misc_feature (1829)..(1829): n is a, c, g, or t
  misc_feature (1834)..(1834): n is a, c, g, or t
  misc_feature (1838)..(1838): n is a, c, g, or t
  misc_feature (1844)..(1846): n is a, c, g, or t
  misc_feature (1849)..(1849): n is a, c, g, or t
  misc_feature (1851)..(1851): n is a, c, g, or t
  misc_feature (1865)..(1865): n is a, c, g, or t
  misc_feature (1886)..(1886): n is a, c, g, or t
  misc_feature (1894)..(1896): n is a, c, g, or t
  misc_feature (2050)..(2050): n is a, c, g, or t
  misc_feature (2058)..(2058): n is a, c, g, or t
  misc_feature (2079)..(2079): n is a, c, g, or t
  misc_feature (2088)..(2088): n is a, c, g, or t
  misc_feature (2118)..(2118): n is a, c, g, or t
  misc_feature (2158)..(2158): n is a, c, g, or t
  misc_feature (2187)..(2187): n is a, c, g, or t
  misc_feature (2203)..(2203): n is a, c, g, or t
  misc_feature (2378)..(2378): n is a, c, g, or t
  misc_feature (2453)..(2453): n is a, c, g, or t
  misc_feature (2563)..(2563): n is a, c, g, or t
  misc_feature (2944)..(2945): n is a, c, g, or t
  misc_feature (2956)..(2956): n is a, c, g, or t
  misc_feature (2972)..(2972): n is a, c, g, or t
  misc_feature (3163)..(3163): n is a, c, g, or t
  misc_feature (3405)..(3405): n is a, c, g, or t
gtgcaatttgtagaggctgcagcacacgagagtgaacagcagaaagaggcttcttggaaacataaccaggaattgcgaaaagccttgcagcagctacaagaagtattgcagaataagagccaacagcttcgtgcctgggaggctgaaaaatacaatgagattcgaacccaggaacaaaacatccagcacctaaaccatagtctgagtcacaaggagcagttgcttcaggaatttcgggagctcctacagtatcgagataactcagacaaaacccttgaagcaaatgaaatgttgcttgagaaacttcgccagcgaatacgtgataaagctgttgctctggagcgggctatagatgaaaaattctctgctctagaagagaaagaaaaagaactgcgccagcttcgtcttgctgtgagagagcgagatcatgacctagagagactgcgcgatgtcctctcctccaatgaagctactatgcaaactatggagagtctcctgagggccaaaggcctggaagtggaacagttatctactacctgtcaaaacctccagtggctgaaagaagaaatggaaaccaaatttagccgttggcagaaggaacaagagagtatcattcagcagttacagacgtctcttcatgataggaacaaagaagtggaggatcttagtgcaacattgctctgcaaacttggaccagggcagagtgagatagcagaggagctgtgccagcgtctacagtgaaaggaaaggatgctgcaggaccttctaagtgatcgaaataaacaagtgctggaacatgaaatggagattcaaggcctgcttcagtctgtgagcaccagggagcaggaaagccaagctgctgcagagaagttggtgcaagccttaatggaaagaaattcagaattacaggccctgcaccaatatttaggagggagagactccctgatgtcccaagcacacatctctaaccaacaagctgaagttacccccactggccgtcttggaaaacagactgatcaaggttcaatgcagataccttccagagatgatagcacttcattgactgccaaagaggatgtcagcatacccagatccacattaggagacttggacncagttgcagggctggaaaaagaactgagtaatgccaaagaggaacttgaactcatggctaaaaaagaaagagaaagtcagctttacccctcaaacatgggagaaaaagtttcagcattttaattcaaattggtaaaaggctgagcaacccttaaagctgccataatggaagaagactgtgagctagcttaaaaaagagagaatgaaggggaagaaacaaaacccctgtgtggcagantgtcnagangnnatnngnnnnnnnnnnnnnnnntcnnntnnnnnnnngnnnnnaggtgcagctgcaggggatgacaccgaagatacaagcactgagttcactgacagtattgaggaggaggctgcacaccatagtcaccagcaagtaagtcagtgtcagggtctgggacttccagggtggacagcacacagcccttctgaggtctgatagtctcctgcagcccttgcggacttagtgagaagatatctttttacatnnnctacttctcagtcatctacctgttctccttgaacttcccagctgcctttccaacccatatcttcactccatttttctctccnntccaccctttggttngtattgtatctctttcttctgcttccttccccctcctacccacctttgcccctatttattctctgtagctatagcttcagaagcatttntacttgcaagacgatggacacattcccctngngcttnttgnaactgnnntgnancacagaagacaggnagtcatcgaagggctgctcgnggaggtgnnngggcggaggaactgcttgggaagaaactccaagaagattggaatgcttccaaagcaagaatctttctcagtgaaatctcattatacaaagagaaccttatgcaacctgacaaaccactgaggtcatggtgactcagtgatcagcagatggtacntcaacagnaatcccctgtcaaacctcagnacttgaggntgaaacattgcttccacccaccatcagtgnagatgtaactagcatgttacaagagtgaataatctggacntcagagattaagtcaccaatagtgatctnacaagtactcaccggnactcctataatgtctccactttgtccatgccatttagcaatctcatctcctaaatggactgtgcctatgattcttaaggagaaagtgaatcattggtagatatcctgcacaagcagctggactttccagtaatagctttcttggggctattaggaaaattaaacaagaaatgagnctttctgggtctgcctgtatgtcttctgcataagaaaaagaagagacatcgaatcaaccaataagaagagcccanataagcatcctcaaatcttttgggatttggcacttggggacatgagtagttgtctgggatacgtcatattctcaacagtttctttgtagtagtaggatcaccttcttatnataggatcaccttcttgttgctatagctgtacccgaccttcccttctcccttgagtgcttgcatgagctccacttttccttttgcttgaacagcttctcctgagtcctccttaccgatggttgtgactttaattatatacatctctgtccctccagacagatccctctgtcctcactctctgatttcattgaggatcttgggtgagagagagggacctgcaggatgaacaaatgtctactctaagacagctagattgggaggttggctggtcactgatggttataatgactgtgggacaggattaacttcagaataaatgaacaggagacacagatgtgaagaaagtttctgattgatatggtctgaagtactcctggtanngcaagtcattngctctaattctcaatngtaggcaaactgatttgtaaatttgcttcttcagccttctttcctgtagcctagcatggagaatctgaccagaccccattttgagaaggtcagcctacactggaatgaactttttacattagggcatttgtatttccctcacaatacttgccacattacttggcataggagagatgcttagtgtaattatnagttaacaagcctttggatcagggcttgactcatgatagacaaagtatatgcctgctggatggaagaatctcttgggcgagcaccatttttctttccatcacctttccttgaaaatatatcttcagctttgggtaggaggaatcttggtgtatgaaatcattgcaaatttacttcatcttttctggagtttgaagttgtgactctcctgctaccaattaaataaagcttactttgccataanaaaaaaaaaaa

SEQ ID NO: 251 - DNA, 987 bp, Homo sapiens
ccggggctgaggaggccgccaagatgccgcagtccaagtcccggaagatcgcgatcctgggctaccggtctgtggggaaatcctcattgacgattcaatttgttgaaggccaatttgtggactcctacgatccaaccatagaaaacacttttacaaagttgatcacagtaaatggacaagaatatcatcttcaacttgtagacacagccgggcaagatgaatattctatctttcctcagacatactccatagatattaatggctatattcttgtgtattctgttacatcaatcaaaagttttgaagtgattaaagttatccatggcaaattgttggatatggtggggaaagtacaaatacctattatgttggttgggaataagaaagacctgcatatggaaagggtgatcagttatgaagaagggaaagctttggcagaatcttggaatgcagcttttttggaatcttctgctaaagaaaatcagactgctgtggatgtttttcgaaggataattttggaggcagaaaaaatggacggggcagcttcacaaggcaagtcttcatgctcggtgatgtgattctgctgcaaagcctgaggacactgggaatatattctacctgaagaagcaaactgcccgttctccttgaagataaactatgcttcttttttcttctgttaacctgaaagatatcatttgggtcagagctcccctcccttcagattatgttaactctgagtctgtccaaatgagttcacttccattttcaaattttaagcaatcatattttcaatttatatattgtatttcttaatattatgaccaagaattttatcggcattaatttttcagtgtagtttgttgtttaaaataatgtaatcatcaaaatgatgcatattgttacactactattaactaggcttcagtatatcagtgtttatttcattgtgttaaatgtatacttgtaaataaaatagctgcaaacctc

SEQ ID NO: 252 - DNA, 1089 bp, Homo sapiens
  misc_feature (2)..(2): n is a, c, g, or t
  misc_feature (6)..(6): n is a, c, g, or t
  misc_feature (12)..(12): n is a, c, g, or t
  misc_feature (15)..(16): n is a, c, g, or t
  misc_feature (18)..(19): n is a, c, g, or t
  misc_feature (21)..(21): n is a, c, g, or t
  misc_feature (27)..(27): n is a, c, g, or t
  misc_feature (51)..(51): n is a, c, g, or t
  misc_feature (53)..(53): n is a, c, g, or t
  misc_feature (540)..(540): n is a, c, g, or t
  misc_feature (550)..(550): n is a, c, g, or t
  misc_feature (590)..(590): n is a, c, g, or t
  misc_feature (617)..(617): n is a, c, g, or t
  misc_feature (622)..(622): n is a, c, g, or t
  misc_feature (655)..(655): n is a, c, g, or t
  misc_feature (696)..(696): n is a, c, g, or t
  misc_feature (712)..(712): n is a, c, g, or t
  misc_feature (715)..(715): n is a, c, g, or t
  misc_feature (752)..(752): n is a, c, g, or t
  misc_feature (762)..(762): n is a, c, g, or t
  misc_feature (785)..(785): n is a, c, g, or t
  misc_feature (814)..(814): n is a, c, g, or t
  misc_feature (847)..(847): n is a, c, g, or t
  misc_feature (859)..(859): n is a, c, g, or t
  misc_feature (892)..(892): n is a, c, g, or t
  misc_feature (1049)..(1049): n is a, c, g, or t
  misc_feature (1052)..(1052): n is a, c, g, or t
  misc_feature (1057)..(1057): n is a, c, g, or t
  misc_feature (1063)..(1063): n is a, c, g, or t
  misc_feature (1065)..(1065): n is a, c, g, or t
  misc_feature (1079)..(1079): n is a, c, g, or t
gngcgnccgccngcnngnntncacagncagcaggagccaccgccgccgcgntngatgtggttgggccggggctgaggaggccgccaagatgccgcagtccaagtcccggaagatcgcgatcctgggctaccggtctgtggggaaatcctcattgacgattcaatttgttgaaggccaatttgtggactcctacgatccaaccatagaaaacacttttacaaagttgatcacagtaaatggacaagaatatcatcttcaacttgtagacacagccgggcaagatgaatattctatctttcctcagacatactccatagatattaatggctatattcttgtgtattctgttacatcaatcaaaagttttgaagtgattaaagttatccatggcaaattgttggatatggtggggaaagtacaaatacctattatgttggttgggaataagaaagacctgcatatggaaagggtgatcagttatgaagaagggaaagctttggcagaatcttggaatgcagcttttttggaatcttctgctanaagaaaatcngactgctgtggatgtttttcgaaggataattttggaggcnagaaaaaatggacggggcagcttcacnaggcnagtcttcatgctcggtgatgtgattctgctgcnaagcctgaggacactgggaatatattctacctgaagaagcnaactgcccgttctccntgnagataaactatgcttcttttttcttctgttaacctgnaagatatcantttgggtcagagctcccctcccntcagattatgttaactctgagtctgtccnaatgagttcacttccattttcaaattttaagcnatcatattttcnatttatatattgtatttcttaatattatgaccnagaattttatcggcattaatttttcagtgtagtttgttgtttaaaataatgtaatcatcaaaatgatgcatattgttacactactattaactaggcttcagtatatcagtgtttatttcattgtgttaaatgtatacttgtaaataaaatagctgcnaancctcnaaaaananaaaaaatagggcgnccgctcgcga

SEQ ID NO: 253 - DNA, 5927 bp, Homo sapiens
ccaggcggcgttgcggccccggccccggctccctgcgccgccgccgccgccgccgccgccgccgccgccgccgccgccagcgctagcgccagcagccgggcccgatcacccgccgcccggtgcccgccgccgcccgcgccagcaaccgggcccgatcacccgccgcccggtgcccgccgccgcccgcgccaccggcatggcgctccggggcttctgcagcgccgatggctccgacccgctctgggactggaatgtcacgtggaataccagcaaccccgacttcaccaagtgctttcagaacacggtcctcgtgtgggtgccttgtttttacctctgggcctgtttccccttctacttcctctatctctcccgacatgaccgaggctacattcagatgacacctctcaacaaaaccaaaactgccttgggatttttgctgtggatcgtctgctgggcagacctcttctactctttctgggaaagaagtcggggcatattcctggccccagtgtttctggtcagcccaactctcttgggcatcaccacgctgcttgctacctttttaattcagctggagaggaggaagggagttcagtcttcagggatcatgctcactttctggctggtagccctagtgtgtgccctagccatcctgagatccaaaattatgacagccttaaaagaggatgcccaggtggacctgtttcgtgacatcactttctacgtctacttttccctcttactcattcagctcgtcttgtcctgtttctcagatcgctcacccctgttctcggaaaccatccacgaccctaatccctgcccagagtccagcgcttccttcctgtcgaggatcaccttctggtggatcacagggttgattgtccggggctaccgccagcccctggagggcagtgacctctggtccttaaacaaggaggacacgtcggaacaagtcgtgcctgttttggtaaagaactggaagaaggaatgcgccaagactaggaagcagccggtgaaggttgtgtactcctccaaggatcctgcccagccgaaagagagttccaaggtggatgcgaatgaggaggtggaggctttgatcgtcaagtccccacagaaggagtggaacccctctctgtttaaggtgttatacaagacctttgggccctacttcctcatgagcttcttcttcaaggccatccacgacctgatgatgttttccgggccgcagatcttaaagttgctcatcaagttcgtgaatgacacgaaggccccagactggcagggctacttctacaccgtgctgctgtttgtcactgcctgcctgcagaccctcgtgctgcaccagtacttccacatctgcttcgtcagtggcatgaggatcaagaccgctgtcattggggctgtctatcggaaggccctggtgatcaccaattcagccagaaaatcctccacggtcggggagattgtcaacctcatgtctgtggacgctcagaggttcatggacttggccacgtacattaacatgatctggtcagcccccctgcaagtcatccttgctctctacctcctgtggctgaatctgggcccttccgtcctggctggagtggcggtgatggtcctcatggtgcccgtcaatgctgtgatggcgatgaagaccaagacgtatcaggtggcccacatgaagagcaaagacaatcggatcaagctgatgaacgaaattctcaatgggatcaaagtgctaaagctttatgcctgggagctggcattcaaggacaaggtgctggccatcaggcaggaggagctgaaggtgctgaagaagtctgcctacctgtcagccgtgggcaccttcacctgggtctgcacgccctttctggtggccttgtgcacatttgccgtctacgtgaccattgacgagaacaacatcctggatgcccagacagccttcgtgtctttggccttgttcaacatcctccggtttcccctgaacattctccccatggtcatcagcagcatcgtgcaggcgagtgtctccctcaaacgcctgaggatctttctctcccatgaggagctggaacctgacagcatcgagcgacggcctgtcaaagacggcgggggcacgaacagcatcaccgtgaggaatgccacattcacctgggccaggagcgaccctcccacactgaatggcatcaccttctccatccccgaaggtgctttggtggccgtggtgggccaggtgggctgcggaaagtcgtccctgctctcagccctcttggctgagatggacaaagtggaggggcacgtggctatcaagggctccgtggcctatgtgccacagcaggcctggattcagaatgattctctccgagaaaacatcctttttggatgtcagctggaggaaccatattacaggtccgtgatacaggcctgtgccctcctcccagacctggaaatcctgcccagtggggatcggacagagattggcgagaagggcgtgaacctgtctgggggccagaagcagcgcgtgagcctggcccgggccgtgtactccaacgctgacatttacctcttcgatgatcccctctcagcagtggatgcccatgtgggaaaacacatctttgaaaatgtgattggccccaaggggatgctgaagaacaagacgcggatcttggtcacgcacagcatgagctacttgccgcaggtggacgtcatcatcgtcatgagtggcggcaagatctctgagatgggctcctaccaggagctgctggctcgagacggcgccttcgctgagttcctgcgtacctatgccagcacagagcaggagcaggatgcagaggagaacggggtcacgggcgtcagcggtccagggaaggaagcaaagcaaatggagaatggcatgctggtgacggacagtgcagggaagcaactgcagagacagctcagcagctcctcctcctatagtggggacatcagcaggcaccacaacagcaccgcagaactgcagaaagctgaggccaagaaggaggagacctggaagctgatggaggctgacaaggcgcagacagggcaggtcaagctttccgtgtactgggactacatgaaggccatcggactcttcatctccttcctcagcatcttccttttcatgtgtaaccatgtgtccgcgctggcttccaactattggctcagcctctggactgatgaccccatcgtcaacgggactcaggagcacacgaaagtccggctgagcgtctatggagccctgggcatttcacaagggatcgccgtgtttggctactccatggccgtgtccatcggggggatcttggcttcccgctgtctgcacgtggacctgctgcacagcatcctgcggtcacccatgagcttctttgagcggacccccagtgggaacctggtgaaccgcttctccaaggagctggacacagtggactccatgatcccggaggtcatcaagatgttcatgggctccctgttcaacgtcattggtgcctgcatcgttatcctgctggccacgcccatcgccgccatcatcatcccgccccttggcctcatctacttcttcgtccagaggttctacgtggcttcctcccggcagctgaagcgcctcgagtcggtcagccgctccccggtctattcccatttcaacgagaccttgctgggggtcagcgtcattcgagccttcgaggagcaggagcgcttcatccaccagagtgacctgaaggtggacgagaaccagaaggcctattaccccagcatcgtggccaacaggtggctggccgtgcggctggagtgtgtgggcaactgcatcgttctgtttgctgccctgtttgcggtgatctccaggcacagcctcagtgctggcttggtgggcctctcagtgtcttactcattgcaggtcaccacgtacttgaactggctggttcggatgtcatctgaaatggaaaccaacatcgtggccgtggagaggctcaaggagtattcagagactgagaaggaggcgccctggcaaatccaggagacagctccgcccagcagctggccccaggtgggccgagtggaattccggaactactgcctgcgctaccgagaggacctggacttcgttctcaggcacatcaatgtcacgatcaatgggggagaaaaggtcggcatcgtggggcggacgggagctgggaagtcgtccctgaccctgggcttatttcggatcaacgagtctgccgaaggagagatcatcatcgatggcatcaacatcgccaagatcggcctgcacgacctccgcttcaagatcaccatcatcccccaggaccctgttttgttttcgggttccctccgaatgaacctggacccattcagccagtactcggatgaagaagtctggacgtccctggagctggcccacctgaaggacttcgtgtcagcccttcctgacaagctagaccatgaatgtgcagaaggcggggagaacctcagtgtcgggcagcgccagcttgtgtgcctagcccgggccctgctgaggaagacgaagatccttgtgttggatgaggccacggcagccgtggacctggaaacggacgacctcatccagtccaccatccggacacagttcgaggactgcaccgtcctcaccatcgcccaccggctcaacaccatcatggactacacaagggtgatcgtcttggacaaaggagaaatccaggagtacggcgccccatcggacctcctgcagcagagaggtcttttctacagcatggccaaagacgccggcttggtgtgagccccagagctggcatatctggtcagaactgcagggcctatatgccagcgcccagggaggagtcagtacccctggtaaaccaagcctcccacactgaaaccaaaacataaaaaccaaacccagacaaccaaaacatattcaaagcagcagccaccgccatccggtcccctgcctggaactggctgtgaagacccaggagagacagagatgcgaaccacccaaaacacgcacaccctgcccctggtgccctgagacagacacacagcctcacgcccccaggaatgcaagtggtttcctggtgcttcccacggaggagttttggcagccagacttctggaggaattggttgtatagaagatcctagtgaccaaattcagcctactgcctcggatctctccagccgaagtctgtggactgcaagtctttgagatgcttctggctcccatcacctctaacatccttgtctgggtctaccaggaacgcttcatttccttggggctgcagttttgtggttgaggggcctggagaaaatcattttctccccttggcagtgtcccagggccctggatggtcctcttaccaacatctggtcttccaggcactcaaaagctgggaaccagcatctcagcgccagctctaccagttctcgttttgggccagaggcagcctctgcactcccacgcctgtcctcctggaagggacctggttggactaacggctaacctggacctggaactgtagggccaggggattgtctcagggccgacgttccacctggggcttccctccccacccaccccgactccaggctttcccttttttcttttgttcaacattgtaagaacaatcaatgctgttattactgatcccaccatgattgatgtggggtaaatattaaggagatggcctcatgggaatttgaccttgactagaaatagagactgagagtgagcaaccagctggaaggtactatgccagtcctagcagaaaaatgtgttaggggcctggcccaaagcagtgttggttgcttacagtgttgattgattttgttcttttttcttaccacctcttttctttccctctcatggtacctgctcatggttatgaagctttcaaagtaaagaacacgaaatac

SEQ ID NO: 254 - DNA, 6767 bp, Homo sapiens
  misc_feature (31)..(31): n is a, c, g, or t
  misc_feature (85)..(85): n is a, c, g, or t
  misc_feature (374)..(374): n is a, c, g, or t
  misc_feature (552)..(552): n is a, c, g, or t
  misc_feature (554)..(554): n is a, c, g, or t
  misc_feature (565)..(565): n is a, c, g, or t
  misc_feature (592)..(592): n is a, c, g, or t
  misc_feature (595)..(595): n is a, c, g, or t
  misc_feature (609)..(609): n is a, c, g, or t
  misc_feature (616)..(616): n is a, c, g, or t
  misc_feature (651)..(651): n is a, c, g, or t
  misc_feature (1680)..(1680): n is a, c, g, or t
  misc_feature (1698)..(1698): n is a, c, g, or t
  misc_feature (1916)..(1916): n is a, c, g, or t
  misc_feature (1924)..(1925): n is a, c, g, or t
  misc_feature (6725)..(6726): n is a, c, g, or t
gtgcttcccggttgcctcgacgaagacaggnggcgccgcgctccgcttgctccgcgcctgagccatgcccagcagccctgtgtanccaccgagtcccggccggagccgaccgacccagtgtgcgccgtctttcggccgagctgagctttcgtgcacgcaactccctctgccccagccggccccgcgccaccatgccccgggcgactgcacttggggccctggtgtcactgctgctgctgctgccgctgcctcgcggcgccgggggactcggggagcgcccggacgccaccgcagactactcagagctggacggcgaggagggcacggagcagcagctggagcattaccacgacccttgcaaagccgctgtcttntggggagacattgccttagatgaagatgacttgaagctgtttcacattgacaaagccagagactggaccaagcagacagtgggggcaacaggacacagcacaggtgggcttgaagagcaggcatctgagagcagcccagacaccacagccatggacactggcaccaaggaagctggananaggatggccgnggagaataccacactcctgcacagccntgnggaccttgcatgcncgcagcnaagaccttctctccccgggtccgaagagccacaanctcaaggacagagaggatatggcctggaggagtcatcccctacgtcattggagggaacttcactgggagccagagggccatttttaagcaggccatgagacactgggagaagcacacctgtgtgaccttcatagaaaggacggatgaggaaagctttattgtattcagttacagaacctgtggctgttgctcctatgttgggcgccgaggaggaggcccacaggccatatccattgggaagaactgtgacaagtttggcattgtggctcacgagctgggccatgtggttgggttttggcatgaacacacccggccagacagagaccaacatgtcaccatcatcagggaaaacatccagccaggtcaggagtataatttcttaaaaatggaagctggggaagtgagctctctgggagagacatacgactttgacagcatcatgcactacgcccggaacaccttctcaagaggagttttcttagacaccatccttccccgtcaagatgacaatggcgtcaggccaaccattggccagcgcgtgcggctcagtcagggagacatagctcaagcccggaagctgtacaaatgcccagcgtgtggggagaccctgcaggacacaacgggaaacttttctgcacctggtttcccaaatgggtacccatcttactcccactgcgtctggaggatctcggtcaccccaggggaaaagatcgtattaaacttcacatccatggatttgtttaaaagccgactgtgctggtatgattacgtggaggtccgggatggttactggagaaaagccccccttttgggcaggttttgtggcgataagatcccggagcccctcgtctccacggacagccggctctgggtggagttccgcagcagcagcaacatcttgggcaagggcttctttgcagcgtacgaagctacctgcgggggagacatgaacaaagatgccggtcagattcaatctcccaactatccggatgactacagaccttccaaggaatgtgtctggaggattanggtttcagaggggtttcnacgtgggacttaccttccaagcttttgagattgaaaggcacgacagctgtgcatatgactacctggaagtccgggatggccccacggaagagagtgccctgatcggccacttttgtggctatgagaagccggaggatgtgaaatcgagctccaacagactgtggatgaagtttgtgtccgatggctctatcaataaagcgggctttgcagccaatttnttcaaggnngtggatgagtgttcctggccagatcacggcgggtgcgagcatcgctgtgtgaacacgctgggcagctacaagtgtgcctgtgaccctggctacgagctggccgccgataagaagatgtgtgaagtggcctgtggcggtttcattaccaagctgaatggaaccatcaccagccctgggtggccgaaggagtatcccacaaacaaaaactgtgtctggcaggtggtggcccccgctcagtaccggatctcccttcagtttgaagtgtttgaactggaaggcaatgacgtctgtaagtacgactttgtagaggtgcgcagcggcctgtcccccgacgccaagctgcacggcaggttctgcggctctgagacgccggaggtcatcacctcgcagagcaacaacatgcgcgtggagttcaagtccgacaacaccgtctccaagcgcggcttcagggcccacttcttctcagataaggacgagtgtgccaaggacaacggcgggtgtcagcatgagtgcgtcaacaccttcgggagctacctgtgcaggtgcagaaacggctactggctccacgagaatgggcatgactgcaaagaggctggctgtgcacacaagatcagcagtgtggaggggaccctggcgagccccaactggcctgacaaataccccagccggagggagtgtacctggaacatctcttcgactgcaggccacagagtgaaactcacctttaatgagtttgagatcgagcagcaccaggaatgtgcctatgaccacctggaaatgtatgacgggccggacagcctggctcccattctgggccgtttctgcggcagcaagaaaccagaccccacggtggcttccggcagcagtatgtttctcaggttttattcggatgcctcagtgcagaggaaaggcttccaggcagtgcacagcacagagtgcgggggcaggctgaaggctgaagtgcagaccaaagagctctattcccacgcccagtttggggacaacaactacccgagcgaggcccgctgtgactgggtgatcgtggcagaggacggctacggcgtggagctgacattccggacctttgaggttgaggaggaggccgactgcggctacgactacatggaagcctacgacggctacgacagctcagcgcccaggctcggccgcttctgtggctctgggccattagaagaaatctactctgcaggtgattccctgatgattcgattccgcacagatgacaccatcaacaaaaaaggctttcatgcccgatacaccagcaccaagttccaggatgccctgcacatgaagaaatagtgctgatgttcttgaaagacagaaactgagaattttttttgttttgttttgtttttaacaacaatagcaccttgaaaatctgccctaaaacagtgtacagtatttttctcaaacaaaaactcagaatccagccttagaggtatatatttgaatgaaagtcttgtaagtttggccaacaaggtggagagaaaaatgttcttttgcttctgtctgcaatgttatcattcatgaactgttaaagtgttaaagattaggattgaagtcactgaccattccggctatgcttcttcataccattctccttgtcccttgctcctatgtggcaaaaggtcagccttggggttggccgttcctctaatctggacttgcttgcaaaggtgccaggctgtcttctgtccatgttgggcataagggatgaaaacttggccgagactaatgtgtggcccacagctttggctggaatcattttctttctctctgccagggacatgtcaaccaagaaacctgaaaatatggatggatgtcaggactaaaaaaaggcatcacagtgagcagtgagcacagagggagtttcgagtataagaatcattgtcatgaagttaggagaccacaaagccatttctcagagtcattcactctccttgtccctttggtttccccccctccctaattgcagtgggggctaaggcatccattatgaatacagcagaacatttgctggcgagagtcctgtctgctgagaagacaatattgtggctcgtcctgatattttttcattcattgactttgagaagactccacctgtgcttggaattccatgggcttcaaagaacatttcttcttttagctttggaggcacttgccgtggcacacctggactccttgacatccaattcaaactgcatttgcaaaatgtgcaaagacctcttatgagggaccaattcaggtcccttatggggtgaacactgttgaagactggttaattataagttatgtaagaatcatcgccttgtggaacaagtcaatcagtgactagcttcctgtagccaatcaggttaaagagtgcgttggtaactttgctctgattaactagtattcaatcaccaacttgcaaacagaattcataacacttggcacttgttctagagaagtgtagaggatgatgtttacataattttagcacctcaaggtataatttaaacagtgaggtagttttgaatggcatttcattaaggcatctatgggcattatgagctaaaagctgtggtatgttagctttaaaagagtatttatgttggaataatttttaaataatgtttacataactgtaagtcctgtttggttgttgttggacgcagggcggcacatgagtgtttttggttagagccaagatagctcccatgcaccggaattcctttgggatgaatcagcatcattttaaacaaagtatatgtaaaaggtgaaaggttatattttttacagatcagaatgtggcaccagaggactgtgtctcattaaagtgattgctgggagcaaaaactagaatgatacaaagaaaggtcagagaaatgcatgggaatattttttccttaaaacagaaaaaaattaaagtattattaataatatatgtctgtatatatgtatgtatgtaaaagatcagctgtcaaagccttaatcaatgcagtgtggaaaatgccaacccctggtcctcgctttactgtgggccctgcaggactggctctccatttcctgcctctcctttcaccaagctctgttttggcctttctcggccctggactgaggctcagcctacacgctcatattgtgcatatggcagaccctgcccagcgtgcgctttgatacagcaaatggagcagctgacctcatggctccaatcccacctgcctgttagggtagattccatttatctgatttttgtattttctgaggttttatttggtctcatcttgtctatgagagttgaaactggaactgggaaacctaagatgggtgttatggttctttctccaaggaaataaaaattctgcagttttaacctttagaagtctaagcaagattaacaaatttcatagaaaagtgggagggagtcagaaacagagttggtgctgctcagcaggacggtgaaacaatgatacttctttttatctctttagtatgaacattttcaaaaacacacagcttcaacaattgtcaccatatggccaatttgcaacaatgggactcttatgaaaaacctttatttaggccttctgtgtgacgtatccacagaaaagagaagctctgattcagctggggctagctgggccgctcctctggaagcccacacttgtggggacttaggcatgacacaggttcttgcaaagaaactagaggctggcttcactagagagagtccattcagcagaaagtcccaggcctctgccttggtgcttccaattatcagtgacctgcctgcaagcatccccagaagcaaacagcagaggtagaagatatcactgcagcctgctttgtgctttaattgggtaccaagctttggggatgacagtgagttgcaagaatagttttagttcagagaattgtcttaggacaacaggctaatgaaggatttggggtctgggtttttagcctggctccgttctggtgtaacccggtctagcaaaagctaagcctggattgcagggcaggaaaaaatctggaattaactttagccagtggaatttcttcaaacagagaaagagaggctgttcattgatccactattccctctattttcctctaaggtaaatatttagaggtatttacctgtaaggtgaagtttcctttttatttctactttacaatttctctctaaagcaagcttgtccaacccttggcccaggacggctttgaatatggcccgacacaaattcgtaaactttttaaaaaacattgtaagattctttctgtgatttttttttttctcgtcagctatcgttagtgtattttatgtgtggcccaagataattcttcttccaatgtggcccagggaagccaaaagatgggacacccctgctgtaaagtttcatatcactcatgaattgctcagctgatttaaataatttgtaaaagcctgctaactagcaaattcacattgagattttctattgattgggtccctttgatagctttcagattggtattgttagcgttccatttgtgaacaaatgttcccttggctttagcagatgtttttaaagtttcttttgtagaccgaacttctgaagagtaataccaaatgcctaaaattttatttttaaaaaggaaaattgtttaaagtattatatgtaaacatatgggtattttttattttgtgtaattttacatttcatgaaatgatgtcagtttcaaagagaaagtggagaggacctaacatatgtctctacctagaaaggatggtttcattaaagaatgtggatttannaaaaaaaaaaaaaaaaaaaaaaaaaaaaaaaaaaaaaaaaa

SEQ ID NO: 255 - DNA, 2330 bp, Homo sapiens
  misc_feature (1832)..(1832): n is a, c, g, or t
  misc_feature (1842)..(1842): n is a, c, g, or t
  misc_feature (1844)..(1844): n is a, c, g, or t
aaaggaccgaggcgtgcagcggacagcagatggatcccgcggccagcagctgcatgaggagcctccagcccccagcccctgtctggggctgccttcgaaacccccactcggaaggcaatggggcctcagggctaccccactacccgcccaccccgttctccttccaccagaaaccagacttcctggcgacagcgacggcagcgtaccctgacttctcagcctcctgcctggcagccaccccacacagcctgccccaggaggagcacatcttcactgagcagcaccccgctttcccacagtcccccaactggcacttccctgtctcagacgcccggcgcaggcccaactcaggcccggcagggggttccaaggaaatggggaccagcagcctgggcctggtggacaccacaggaggcccaggcgatgactacggggtgcttgggagcactgccaatgagacagagaagaaatcatccaggcggagaaaggagagttcagacaaccaggagaacagagggaagccggagggcagcagcaaagcccgcaaggagaggacggccttcaccaaggagcagctgcgagagctggaggcagagtttgcccatcataactacctgactcggctccgcagatatgagattgcggtaaacctggacctctctgagcgccaggtcaaagtgtggttccagaaccgaaggatgaagtggaagcgtgtgaagggaggtcagcccatctcccccaatgggcaggaccctgaggatggggactccacagcctctccaagttcagagtgagattctgcatggaggaaaaatgactaaggactgagccccctacccaactacccccaccccaatcccaccttcaccctcttccttccccagccagggcagcctctccacatctttccctgactcttggatatgaaactgcccagcattcctgggagtcttaggattttctaggaagttctgtccagcctcttagcagcctcttccctagggcctttgctcccacactctcatggaatcagacagagatcctaccgggccggatgaatctggaaacagcttcagagatactgcttctcagcgtctcttggctgccacccatgcctcctcctaccgctgttctcctaggtcagccaggcctcctcctggtctggacaccacctggcctggtgggagaggagctttggaaccagctggcgactcggaaagtaaatgcttcaaaaggaaggaaatgacagagacacacgcccttgcccaccttcctctgtaggctgcacatctgaggctttggggccccttagttgtcccgaaaccccaagaaaaatcagaatgaggagagtcaaggacagcaactcagctgctgcaagccagaaacacatccctgtctccaaatttgttggctaagtggagacacttctgagaactgactagagaagacaagaaaatagcccgatgtaggtttcggtgtccccatataggccccgtccacacaggcttgactgggtggacaagaatgaacccatgacagcacctgctgcttcaaaatcaaaatcaatttagggatacagcaggggctgttgggctgtgctccagagaaaaggagcagctactccttttaaatccacgatttctggattgaaaacctgtccagatgctgagttgttgggctgaacaactaggagctgaaaacaacgtagaggctggaaagtgtcccctgcattctggaggggaggggagataataaggagggctgctgggtgagggcctggagatgtggaaccctggagtggaaggtttctccagtgacagtgtcctgtgacngcaaaagggnanaagaaaatccctcttcctccatgggatggatttaagctcttgctgtgtgttctacaaatgctgttattgtgggaggaaatgctaggtttttgtgtgtggactgcccagacctcagccaggtcttctggagatgacatttgaggactgatggccaaagagcatgggggactgaagccctggctgcctcagcgctctgtctcccaacaccagctggtgttgcagagggaggtcaacgtgagtttggatctcttgtacgcagatgtaatcattcacatgtaaaaataaccccacctccccaccccaaaaagggcaagagctgtggaaaatgattgccaaatgagatggctggttagagcatgattttttctaaagcatacttcatatattttcttaagattacatcaagctaattgtgcgagctcaattcactttgtaagaaaactctcggagaaataaaatcaataaaaagccaaaaaaaaaaataag

SEQ ID NO: 256 - DNA, 652 bp, Homo sapiens
  misc_feature (346)..(346): n is a, c, g, or t
  misc_feature (524)..(524): n is a, c, g, or t
  misc_feature (527)..(528): n is a, c, g, or t
  misc_feature (530)..(531): n is a, c, g, or t
  misc_feature (647)..(647): n is a, c, g, or t
ctagatggtgtggctggaactgggtaagtgaccccaaacacaggctttccctcccgaaggggtcatctggagaacaacctgatggtaccaagataatgagctatcatctgataataatgaatgattgagaatctcaaaataaagaaatcctgccaaacaactgacctcaaaacatttttctttcttcgcttggtgaagcaggctagccattccgggaagcagaacaggaaagatgaaagtttccaaatattctttgggagaacatgtttttgggttgattgtttccgatttatcttgaggacagggtgtacgtgagatcatggtgaaatgggaaaccggaaaatantgctctgcactgaagccatgaaaaagcatttcctctactggcgcaaccgtaatcacaggctcctgtttgactttatatccttctggaaagggaggctgctcagcttcatactccttgcagatctgctcccacagattcttgcttgacggctcggtgacctgccacgacgagacaggcnagnncnngggacgcgagagacacggtgggcaccggcgtccgggtgaacgacgagtctgtagagcagctgggcttgaggcgcactatgtggctggggatttgccgcggtgccgccatggccgcngtttc

SEQ ID NO: 257 - DNA, 652 bp, Homo sapiens; identical to SEQ ID NO: 256
  misc_feature (346)..(346): n is a, c, g, or t
  misc_feature (524)..(524): n is a, c, g, or t
  misc_feature (527)..(528): n is a, c, g, or t
  misc_feature (530)..(531): n is a, c, g, or t
  misc_feature (647)..(647): n is a, c, g, or t

SEQ ID NO: 258 - DNA, 1003 bp, Homo sapiens
ctctgagcttctctgagccttgtttgctcatctggaaaaaggggattaaaccatttacctcatggagttgtgaaagaatagctgcaaagcacctaacacatagtaaggttcccagtgcagctacttctgctgggttgagtctagctgtgtaggccccttgttcctcacctggagaaactggggtggcaggccggtcccccacaaaagataactcatctcttaatttgcaagctgcctcaacaggagggtgggggaacagctcaacaatggctgatgggcgctcctggtgttgatagagatggaacttggacttggaggcctctccacgctgtcccactgcccctggcctaggcggcagcctgccctgtggcccaccctggccgctctggctctgctgagcagcgtcgcagaggcctccctgggctccgcgccccgcagccctgccccccgcgaaggccccccgcctgtcctggcgtcccccgccggccacctgccggggggacgcacggcccgctggtgcagtggaagagcccggcggccgccgccgcagccttctcggcccgcgcccccgccgcctgcacccccatctgctcttccccgcgggggccgcgcggcgcgggctgggggcccgggcagccgcgctcgggcagcgggggcgcggggctgccgcctgcgctcgcagctggtgccggtgcgcgcgctcggcctgggccaccgctccgacgagctggtgcgtttccgcttctgcagcggctcctgccgccgcgcgcgctctccacacgacctcagcctggccagcctactgggcgccggggccctgcgaccgcccccgggctcccggcccgtcagccagccctgctgccgacccacgcgctacgaagcggtctccttcatggacgtcaacagcacctggagaaccgtggaccgcctctccgccaccgcctgcggctgcctgggctgagggctcgctccagggctttgcagactggacccttaccggtgg

SEQ ID NO: 259 - DNA, 923 bp, Homo sapiens
  misc_feature (135)..(135): n is a, c, g, or t
  misc_feature (168)..(168): n is a, c, g, or t
  misc_feature (200)..(200): n is a, c, g, or t
  misc_feature (202)..(202): n is a, c, g, or t
  misc_feature (463)..(463): n is a, c, g, or t
tgagggagagcagggcttggcttgggcagcggttaggtgtgggagggaaaatggtcagggagggaccaggtgaatgggaggaggagcgggacttctctgaatggtcggtgcactcaggtgattcctcccctgggntcccagaggcagcaaacccattatactggaacntaggcccttcctgagtttcccctccacacagntnggagcccatgcccggcctgatctcagcccgaggacagcccctccttgaggtccttcctccccaagcccacctgggtgccctctttctccctgaggctccacttggtctctccgcgcagcctgccctgtggcccaccctggccgctctggctctgctgagcagcgtcgcagaggcctccctgggctccgcgccccgcagccctgccccccgcgaaggccccccgcctgtcctggcgtcccccgccggccacctgccgggggnacgcacggcccgctggtgcagtggaagagcccggcggccgccgccgcagccttctcggcccgcgcccccgccgcctgcacccccatctgctcttccccgcgggggccgcgcggcgcgggctgggggcccgggcagccgcgctcgggcagcgggggcgcggggctgccgcctgcgctcgcagctggtgccggtgcgcgcgctcggcctgggccaccgctccgacgagctggtgcgtttccgcttctgcagcggctcctgccgccgcgcgcgctctccacacgacctcagcctggccagcctactgggcgccggggccctgcgaccgcccccgggctcccggcccgtcagccagccctgctgccgacccacgcgctacgaagcggtctccttcatggacgtcaacagcacctggagaaccgtggaccgcctctccgccaccgcctgcggctgcctgggctga

SEQ ID NO: 260 - DNA, 2019 bp, Homo sapiens; identical to SEQ ID NO: 18

SEQ ID NO: 261 - DNA, 1249 bp, Homo sapiens
gaattccgtaaagctagaccgatctccggggagccccgagtaggcgagcggcggccgagctagttgagcgcaccccccgggcgccccagcgcgccgcggcgggcgcgtccaggcggcatggagaaggacggcctgtgccgcgctgaccagcagtacgaatgcgtggcggagatcggggagggcgcctatgggaaggtgttcaaggcccgcgacttgaagaacggaggccgtttcgtggcgttgaagcgcgtgcgggtgcagaccggcgaggagggcatgccgctctccaccatccgcgaggtggcggtgctgaggcacctggagaccttcgagcaccccaacgtggtcaggttgtttgatgtgtgcacagtgtcacgaacagacagagaaaccaaactaactttagtgtttgaacatgtcgatcaagacttgaccacttacttggataaagttccagagcctggagtgcccactgaaaccataaaggatatgatgtttcagcttctccgaggtctggactttcttcattcacaccgagtagtgcatcgcgatctaaaaccacagaacattctggtgaccagcagcggacaaataaaactcgctgacttcggccttgcccgcatctatagtttccagatggctctaacctcagtggtcgtcacgctgtggtacagagcacccgaagtcttgctccagtccagctacgccacccccgtggatctctggagtgttggctgcatatttgcagaaatgtttcgtagaaagcctctttttcgtggaagttcagatgttgatcaactaggaaaaatcttggacgtgattggactcccaggagaagaagactggcctagagatgttgcccttcccaggcaggcttttcattcaaaatctgcccaaccaattgagaagtttgtaacagatatcgatgaactaggcaaagacctacttctgaagtgtttgacatttaacccagccaaaagaatatctgcctacagtgccctgtctcacccatacttccaggacctggaaaggtgcaaagaaaacctggattcccacctgccgcccagccagaacacctcggagctgaatacagcctgaggcctcagcagccgccttaagctgatcctgcggagaacacccttggtggcttatgggtccccctcagcaagccctacagagctgtggaggattgctatctggaggccttccagctgctgtcttctggacaggctctgcttctccaaggaaa

SEQ ID NO: 262 - DNA, 3583 bp, Homo sapiens
aaaggcctgcagcaggacgaggacctgagccaggaatgcaggatggcggcggtgaagaaggaagggggtgctctgagtgaagccatgtccctggagggagatgaatgggaactgagtaaagaaaatgtacaacctttaaggcaagggcggatcatgtccacgcttcagggagcactggcacaagaatctgcctgtaacaatactcttcagcagcagaaacgggcatttgaatatgaaattcgattttacactggaaatgaccctctggatgtttgggataggtatatcagctggacagagcagaactatcctcaaggtgggaaagagagtaatatgtcaacgttattagaaagagctgtagaagcactacaaggagaaaaacgatattatagtgatcctcgatttctcaatctctggcttaaattagggcgtttatgcaatgagcctttggatatgtacagttacttgcacaaccaagggattggtgtttcacttgctcagttctatatctcatgggcagaagaatatgaagctagagaaaactttaggaaagcagatgcgatatttcaggaagggattcaacagaaggctgaaccactagaaagactacagtcccagcaccgacaattccaagctcgagtgtctcggcaaactctgttggcacttgagaaagaagaagaggaggaagtttttgagtcttctgtaccacaacgaagcacactagctgaactaaagagcaaagggaaaaagacagcaagagctccaatcatccgtgtaggaggtgctctcaaggctccaagccagaacagaggactccaaaatccatttcctcaacagatgcaaaataatagtagaattactgtttttgatgaaaatgctgatgaggcttctacagcagagttgtctaagcctacagtccagccatggatagcaccccccatgcccagggccaaagagaatgagctgcaagcaggcccttggaacacaggcaggtccttggaacacaggcctcgtggcaatacagcttcactgatagctgtacccgctgtgcttcccagtttcactccatatgtggaagagactgcacaacagccagttatgacaccatgtaaaattgaacctagtataaaccacatcctaagcaccagaaagcctggaaaggaagaaggagatcctctacaaagggttcagagccatcagcaagcgtctgaggagaagaaagagaagatgatgtattgtaaggagaagatttatgcaggagtaggggaattctcctttgaagaaattcgggctgaagttttccggaagaaattaaaagagcaaagggaagccgagctattgaccagtgcagagaagagagcagaaatgcagaaacagattgaagagatggagaagaagctaaaagaaatccaaactactcagcaagaaagaacaggtgatcagcaagaagagacgatgcctacaaaggagacaactaaactgcaaattgcttccgagtctcagaaaataccaggaatgactctatccagttctgtttgtcaagtaaactgttgtgccagagaaacttcacttgcggagaacatttggcaggaacaacctcattctaaaggtcccagtgtacctttctccatttttgatgagtttcttctttcagaaaagaagaataaaagtcctcctgcagatcccccacgagttttagctcaacgaagaccccttgcagttctcaaaacctcagaaagcatcacctcaaatgaagatgtgtctccagatgtttgtgatgaatttacaggaattgaacccttgagcgaggatgccattatcacaggcttcagaaatgtaacaatttgtcctaacccagaagacacttgtgactttgccagagcagctcgttttgtatccactccttttcatgagataatgtccttgaaggatctcccttctgatcctgagagactgttaccggaagaagatctagatgtaaagacctctgaggaccagcagacagcttgtggcactatctacagtcagactctcagcatcaagaagctgagcccaattattgaagacagtcgtgaagccacacactcctctggcttctctggttcttctgcctcggttgcaagcacctcctccatcaaatgtcttcaaattcctgagaaactagaacttactaatgagacttcagaaaaccctactcagtcaccatggtgttcacagtatcgcagacagctactgaagtccctaccagagttaagtgcctctgcagagttgtgtatagaagacagaccaatgcctaagttggaaattgagaaggaaattgaattaggtaatgaggattactgcattaaacgagaatacctaatatgtgaagattacaagttattctgggtggcgccaagaaactctgcagaattaacagtaataaaggtatcttctcaacctgtcccatgggacttttatatcaacctcaagttaaaggaacgtttaaatgaagattttgatcatttttgcagctgttatcaatatcaagatggctgtattgtttggcaccaatatataaactgcttcacccttcaggatcttctccaacacagtgaatatattacccatgaaataacagtgttgattatttataaccttttgacaatagtggagatgctacacaaagcagaaatagtccatggtgacttgagtccaaggtgtctgattctcagaaacagaatccacgatccctatgattgtaacaagaacaatcaagctttgaagatagtggacttttcctacagtgttgaccttagggtgcagctggatgtttttaccctcagcggctttcggactgtacagatcctggaaggacaaaagatcctggctaactgttcttctccctaccaggtagacctgtttggtatagcagatttagcacatttactattgttcaaggaacacctacaggtcttctgggatgggtccttctggaaacttagccaaaatatttctgagctaaaagatggtgaattgtggaataaattctttgtgcggattctgaatgccaatgatgaggccacagtgtctgttcttggggagcttgcagcagaaatgaatggggtttttgacactacattccaaagtcacctgaacaaagccttatggaaggtagggaagttaactagtcctggggctttgctctttcagtgagctaggcaatcaagtctcacagattgctgcctcagagcaatggttgtattgtggaacactgaaactgtatgtgctgtaatttaatttaggacacatttagatgcactaccattgctgttctactttttggtacaggtatattttgacgtcactgatattttttatacagtgatatacttactcatggccttgtctaacttttgtgaagaactattttattctaaacagactcattacaaatggttaccttgttatttaacccatttgtctctacttttccctgtacttttcccatttgtaatttgtaaaatgttctcttatgatcaccatgtattttgtaaataataaaatagtatctgttaaaaaaaaaaaaaaaaaaaaaaaaaaa

SEQ ID NO: 263 - DNA, 1399 bp, Homo sapiens
cttcggcgtcgcgtcgctcctgcgctggagctctaggccggcgtctctccgcgagccgcggtcaagtgccagtggctaagggtgcgcgagtagccgccacccgttcggcgttggctctggcgtcggggtcgttgtgtcgtgacaaccgctgcggtagccgtttccgaggcagcagttgcggccgctttagccctgagcgggatctgcggctgcctcgcagtctctgctgtgccgacccttctcttcgcggaccccacgccaagcagcgaccctgagccgacagccggagcgcccggcaatggcggcctcgacggcctcgcaccggcccatcaaggggatcttgaagaacaagacctctacgacttcctctatggtggcgtcggccgaacagccccgcgggaatgtcgacgaggagctgagcaaaaaatcccagaagtgggatgaaatgaacatcttggcgacgtatcatccagcagacaaagactatggtttaatgaaaatagatgaaccaagcactccttaccatagtatgatgggggatgatgaagatgcctgtagtgacaccgaggccactgaagccatggcgccagacatcttagccaggaaattagctgcagctgaaggcttggagccaaagtatcggattcaggaacaagaaagcagtggagaggaggatagtgacctctcacctgaagaacgagaaaaaaagcgacaatttgaaatgaaaaggaagcttcactacaatgaaggactcaatatcaaactagccagacaattaatttcaaaagacctacatgatgatgatgaagatgaagaaatgttagagactgcagatggagaaagcatgaatacggaagaatcaaatcaaggatctactccaagtgaccaacagcaaaacaaattacgaagttcatagacgagatttgttcaacactgcaattgtttgttagatgtaaaccctgtgactatagtacgttgcttcttgttcttcacaattcatgacttaagtaccaaaatgcataccagttattatatattgccaagaattaaatgataaacttagagactgattagactgaaaatgcctaatcgatatatatattcttgtgcctagtactttaccacaaatacagtgtaatatcatcagtccaaaactgcattacttttgtaaaaacactggttaatttgtataagatattatagagctttttatgctttagaagttaaacaatatctttgggggggaactaatttattttcatcacttgaaatgtggtagctcttacaaagtttattgatttgatttttttaaaaatcaaaagccaattgaacaacaggatatatagactgataaatatttaggctgaatagtattttaacacttgtcttcaacttgatt

SEQ ID NO: 264 - DNA, 1108 bp, Homo sapiens
ttttttgcaggaggaaggacagcacagctgaccagccgtgctctggaagcttctggatcctaggctcatctccacagaggagaacatgcacgcagcagagatcatggggcccctctcagcccctccctgcacagagcacatcaaatggaaggggctcctgctcacagtggagactcccaagccctccatctccagcagcaacttaaaccccagggaggccatggagactgtgatcttaacctgtaatcctgagactccggacgcaagctacctgtggtggatgaatggtcagagcctccctatgactcataggatgcagctgtctgaaaccaacaggaccctctttctatttggtgtcacaaagtatactgcaggaccctatgaatgtgaaatatggaactcagggagtgccagccgcagtgacccagtcaccctgaatctcctccatggtccagacctccccagaattttcccttcagtcacctcttactattcaggagagaacctcgacttgtcctgcttcgcaaactctaacccaccagcacagtattcttggacaattaatgggaagtttcagctatcaggacaaaagctctttatccctcagattactccaaagcataatgggctctatgcttgctctgctcgtaactcagccactggcgaggaaagctccacatccttgacaatcagagtcattgctcctccaggattaggaactttttgctttcaataatccaagtagcagccctgatgtcatttttgtatttcaggaagactggcaggagatttatggaaaagactatgaaaaggactcttgaatacaagttcctgataacttcaagatcataccactggactaagaactttcaaaattttgatgaacaggctgataccttcatgaaattcaagacaaagaagaaaagaactccatttcattggactaaataacaaaaggataatgttttcataattttttattggaaaaatgtgctgattttttgaatgttttatccctccagatttatgaatttttttcttcagcaattggtaaagtatacttttgtaaacaaaaattgaaacatttgcttttgctctctgagtgccc

SEQ ID NO: 265 - DNA, 2239 bp, Homo sapiens
gaattccgtcccgagctccgcaatgaagacgtgcagctccgactcaacagtattaagaagttatcaacaattgccctagcacttggagtagaaaggacccgaagtgaattgttgccatttcttacagatacaatttatgatgttgatgaggtactattagctcttgctgagcagctgggaaatttcactggcctagtgggaggtcctgactttgcccactgtctgctgcctcctttggaaaatctggcaactgtggaagagactgttgttcgtgacaaggctgtggagtccctgagacagatctcccaggagcatactcctgttgctctggaagcttattttgtacctctggtgaaacgcttagcaagtggggattggttcacctctcgcacatctgcatgtggtttgttcagcgtttgctatcccagggcatcaaatgctgttaaagcagaaaccagacagcaattccgttccttgtgctcagatgacacaccaatggtacgacgtgctgctgcttccaaattgggtgaatttgcaaaagttttggaattagacagtgtgaaaagtgaaattgttccactgttcactagtctagcttcagatgaacaggattcagtgcgcctccttgctgtggaagcttgtgtcagtattgcccagttattgtctcaggatgaccttgagactttggtgatgcctacacttcgacaagcagcagaagataaatcttggcgcgttcgctatatggtggctgacagattttcagagctccagaaagccatgggtcctaaaatcaccctaaatgacctcatccccgcctttcagaacctacttaaagactgtgaagctgaagtccgggcagctgctgcccacaaagtaaaagaacttggtgagaacttgcccattgaagatagagagaccataattatgaatcaaattctgccttatataaaggaattagtatccgataccaatcaacatgtcaaatcggctctagcttctgtaattatgggattgtctactattttgggcaaagaaaataccattgaacatcttctacctcttttcttagctcagttaaaggatgagtgtcctgacgttcgtttgaatatcatctccaatttggattgtgtaaatgaagtgattggaatccgtcggctctctcagtctctccttcctgccatagtggagctggcagaagatgccaaatggagggtccgcctggccatcattgagtatatgccgctgctggcaggccagctgggtgtggaattctttgatgaaaagctgaattctttatgtatggcttggctcgtggaccatgtatacgccatccgagaagctgccaccaacaacctcatgaaactagttcagaagtttggtacagagtgggcccaaaatactattgttcccaaagtgttagtaatggcaaatgatcctaattacttgcatagaatgaccactttattctgcattaatgcactgtctgaggcctgtggtcaggaaataactactaagcaaatgctgcccatcgtattaaaaatggcaggagaccaagtagcaaatgttcgcttcaatgtggccaaatctctacaaaagattggaccaattctagataccaatgctttacagggagaagtgaagccagtactacagaagttaggtcaagatgaagacatggatgtcaaatactttgcacaggaagctataagtgttcttgcattggcataatgaggagcaggagggaaaaggcctttactagattcttgtcacaaatttctagtcaatgtgttcttaactgggtggagaaagaatggaaaaccttcaagatctcatccaagcaaatggcaacaacttagaagaaatcatttagtgacttaattctttctaaagatgaaatgggattgttttttactcgtattccttgttaaatcattatttaagccgttcttattgaccaattcctgacacttgattgtctcctaatgctttatccatcaccacctgggctcctgcatcctcactgtggaatcaggcaccagccacataatgttccagacaaagcctggaagggtgtggacccagacgtggagtggagtgattctcttgacgtttacatatatctctgtgtctctccatcattccaaagctaaatgtacatgtttagaataacttattttataaactcttcgggagacatgttgagatttgaccgtaatgaaagccacattttccggaattc

SEQ ID NO: 266 - DNA, 3328 bp, Homo sapiens
  misc_feature (14)..(14): n is a, c, g, or t
  misc_feature (17)..(17): n is a, c, g, or t
  misc_feature (19)..(24): n is a, c, g, or t
  misc_feature (26)..(26): n is a, c, g, or t
  misc_feature (59)..(59): n is a, c, g, or t
  misc_feature (194)..(194): n is a, c, g, or t
  misc_feature (597)..(597): n is a, c, g, or t
  misc_feature (1322)..(1322): n is a, c, g, or t
  misc_feature (1905)..(1905): n is a, c, g, or t
  misc_feature (2458)..(2458): n is a, c, g, or t
  misc_feature (2527)..(2527): n is a, c, g, or t
  misc_feature (2730)..(2730): n is a, c, g, or t
  misc_feature (2774)..(2774): n is a, c, g, or t
  misc_feature (2914)..(2914): n is a, c, g, or t
ctagaattcagcgnccncnnnnnncngagcccggatgaagagtaacgccattaccgccngagccgccgagagccttagccgacggaaactggacactggaccggcagcgccatgagactcctcccccgcttgctgctgcttctcttactcgtgttccctgccactgtcttgttccgaggcggccccagaggctngttagcagtggcacaagatcttacagaggatgaagaaacagtagaagattccataattgaggatgaagatgatgaagccgaggtagaagaagatgaacccacagatttggtagaagataaagaggaagaagatgtgtctggtgaacctgaagcttcaccgagtgcagatacaactatactgtttgtaaaaggagaagattttccagcaaataacattgtgaagttcctggtaggctttaccaacaagggtacagaagattttattgttgaatccttagatgcctcattccgttatcctcaggactaccagttttatatccagaatttcacagctcttcctctgaacactgtagtgccaccccagagacaggcaacttttgagtactctttcattcctgcagangcccatgggcggacgaccatttggtttggtcatcaatctgaactacaaagatttgaacggcaatgtattccaagatgcagtcttcaatcaaacagttacagttattgaaagagaggatgggttagatggagaaacaatctttatgtatatgttccttgctggtcttgggcttctggttattgttggccttcatcaactcctagaatctagaaagcgtaagagacccatacagaaagtagaaatgggtacatcaagtcagaatgatgttgacatgagttggattcctcaggaaacattgaatcaaatcaataaagcttcaccaagaaggttgcccaggaaacgggcacagaagagatcagtgggatctgatgagtaaatgttcctttgtgcaacaattcggtctttacttaacctgccctaatatttttcggcctgatgggaattagtgcagagaagccatgtcaccatagaaggcaactcctacttgtgtgtggactgagcaatcagagtctgtggcgataatattgctgaaaatgcactgcattcatttttctaaagtaacaaatttggtttttttttaaaccattaaaatctatgtgtgtgcgtgtgtatgtatgtgagcagttggtcttaccagaatcattgttgaactacctgaaacaagtctttagaatactaaatataatgctgttgtctcttcctttttgacattttctgattttttncccccaaaactcagttaatatttacccactatgattattgatgtcctgccttgaacagttttaaagaaaacaatttttggaatagctcaaatttcaattgatggcacaaatcagcattttgttgttgttactgtattacaattagtattctaaaggcagaagcagaagtagctgctttttagcaatagaattgtttcagtattttgctgctgtttaatgcgcatcttcagaaaacttcccagtggcttcaaggaatttggggatctctctggcaacaaattgtgaaacatgaaatttctgctgactttaatatatgaaacctaatcctacccccttttttaacaaaaagaaactagtacatttgtgaaaattgtgttgtgttgtccattgttgctctagttctgacccagaggtagctctggagtgattttagacctactcactcagttgtgtgtaggtttttttgttttgttttgagagagaatttttctctccttaatagaagcatcctttttaaagagaagttgccttggtccacacactaagcagaaaaccaagttatcaggacagagatatttcccanttactcctaatcaatgaagaaagtgagttggatatttttaaagcagttaactaattttttcttacctaatcttttgggagttttgcttgttgatataacctttttagttaacctgaaagattccaaaaattgttcttaagtgcttgagactggaaccaaaattaaattgtacttcataaaatcctcttatagagttactcttgccctagattgtaaattaagtttggcattattgtcagactggatggagggtgaagtaaaatagtatgaacaattaagaggctctccccctcttgtctttaagccatattctcctacatgtattttataagaaaatgttaagtcaaattttagtggctctttaattcctgacctcttcattctccttttcagtataacctcccctatgctcatgcccacacagacaaaaaaacaaaacgaaatacacacagaaaaaagtctttccaaactgtttaagtatttaaacatctgagccaaagcagatagaagttattgtataattgttaatcactttgcaaataggggctatcanattacctatattggcattgctggattataaactctatatctgtaatataaagtgtttgagtttttaatngggctgttatgatcagtagttgattttgagaaagctctatgagctctaagtaactgcatggttttttgtttaatgtaatataggagacccttcacattcccaaggaatatattccaaaacatttttgtgaatatctaagtttgtgaaactactagggcatgatacagtaaggtgtaattacagaatttacgaaatgtaaatgncctctacagagttttatggaatacctggtactaacgtaggcagntgcaaaaccacactgagttacagctgtcagccctcctcattcctaaataacttgccttacatatcagccctcccacttctgaagttcaaattagtgcctcggaaatgtagaatttattatttgtcatttttttttttttnagcatagattgagaacagttgaactcttaaatcctcagatgccaggggtctgctctagcatcagtaagtatttagcagaaactaactccgtaatgaatggaattcaattccacacatggtttgttcaagcacacttaataagtagcctattttttaaatgtctttttaaaatgtaaatatttggatgaagtttttctttgttttgatatattcatttgctacaccaactatgttttcagaattcatcttttgaacaacttggtttcagaatatgtaaaatgactttaaggatcttgtgtatcaaacctatccccggatgtgtgagaataatgtgttcataaagcatggatctcgcaaaaaaaaaaaaaaaaaaaaaaaaaaaaaaaaaaaaaaaaaaaaaaaaaaaaaaaaaaa

SEQ ID NO: 267 - DNA, 741 bp, Homo sapiens
gagaaatttttcattttctttcttgtttgactgtatgcaaacatcaaactaagaatggcaaagatgaatctctcttcctatatattaatactaactttttctttgttttctcaaggtattttactttcagcatccaagtccataagaaatttagatgatgacatggtatttaatacattcaggttggggaaaggctttcagaaggaagacactgcagaaaaatcagttattgctccttccctggaacaatataaaaatgatgagagcagtttcatgaacgaagaggaaaataaagtttcaaagaacacaggctccaaacataatttcttaaatcatggtctgccactcaatctggctataaaaggatatcaagcactaaaaggatctgtagatttcccagctgagaatggagttcagaatactgaatcaacacaagaaaagagagaaattggggatgaagaaaactcagctaaatttcctataggaaggagagattttgacatgctcagatgtatgctcggaagagtctaccgaccctgttggcaagtctgatacctgttggtccacatcatcttttcagaagaaaataaaagcatttaattgccaatgggaggagaagcccatactgctactataacttgtgtatgttaaatgtctgttttaaaagaaagtagtgttaaatgtatcagtaactgaaatgatatgctttctctgtgcattaaatttgtgaaaattctgcat

SEQ ID NO: 268 - DNA, 932 bp, Homo sapiens
gaaagcctgccagcacctattccacctcccagcccagcatggcacccctgctgcccatccggaccttgcccttgatcctgattctgctggctctgctgtccccaggggctgcagacttcaacatctcaagcctctctggtctgctgtccccggcgctaacggagagcctgctggttgccttgcccccctgtcacctcacaggaggcaatgccacactgatggtccggagagccaatgacagcaaagtggtgacgtccagctttgtggtgcctccgtgccgtgggcgcagggaactggtgagtgtggtggacagtggtgctggcttcacagtcactcggctcagtgcataccaggtgacaaacctcgtgccaggaaccaaattctacatttcctacctagtgaagaaggggacagccactgagtccagcagagagatcccaatgtccacactccctcgaaggaacatggaatccattgggctgggtatggcccgcacagggggcatggtggtcatcacggtgctgctctctgtcgccatgttcctgctggtgctgggcttcatcattgccctggcactgggctcccgcaagtaaggaggtctgcccggagcagcagcttctccaggaagcccagggcaccatccagctccccagcccacctgctcccaggccccaggcctgtggctcccttggtgccctcgcctcctcctcctgccctcctctcccctagagccctctcctccctctgtccctctccttgcccccagtgcctcaccttccaacactccattattcctctcaccccactcctgtcagagttgactttcctcccattttaccactttaaacacccccataacaattcccccatccttcagtgaactaagtccctataataaaggctgaggctgcatctgccaaaaaaaaaaaaaa

SEQ ID NO: 269 - DNA, 7923 bp, Homo sapiens
gcgcactcgggcacgcgctcggaagtcgggggtcggcgcggagtgcaggctgctcccggggtaggtgagggaagcgcggaggcggggcgcgggggcagtggtcggcgagcagcgcggtcctcgctaggggcgcccacccgtcagtctctccggcgcgagccgccgccaccgcccgcgccggagtcaggcccctgggcccccaggctcaagcagcgaagcggcctccgggggacgccgctaggcgagaggaacgcgccggtgcccttgccttcgccgtgacccagcgtgcgggcggcgggatgagagggagccatcgggccgcgccggccctgcggccccgggggcggctctggcccgtgctggccgtgctggcggcggccgccgcggcgggctgtgcccaggcagccatggacgagtgcacggacgagggcgggcggccgcagcgctgcatgcccgagttcgtcaacgccgctttcaacgtgactgtggtggccaccaacacgtgtgggactccgcccgaggaatactgtgtgcagaccggggtgaccggggtcaccaagtcctgtcacctgtgcgacgccgggcagccccacctgcagcacggggcagccttcctgaccgactacaacaaccaggccgacaccacctggtggcaaagccagaccatgctggccggggtgcagtaccccagctccatcaacctcacgctgcacctgggaaaagcttttgacatcacctatgtgcgtctcaagttccacaccagccgcccggagagctttgccatttacaagcgcacacgggaagacgggccctggattccttaccagtactacagtggttcctgcgagaacacctactccaaggcaaaccgcggcttcatcaggacaggaggggacgagcagcaggccttgtgtactgatgaattcagtgacatttctcccctcactgggggcaacgtggccttttctaccctggaaggaaggcccagcgcctataactttgacaatagccctgtgctgcaggaatgggtaactgccactgacatcagagtaactcttaatcgcctgaacacttttggagatgaagtgtttaacgatcccaaagttctcaagtcctattattatgccatctctgattttgctgtaggtggcagatgtaaatgtaatggacacgcaagcgagtgtatgaagaacgaatttgataagctggtgtgtaattgcaaacataacacatatggagtagactgtgaaaagtgtcttcctttcttcaatgaccggccgtggaggagggcaactgcggaaagtgccagtgaatgcctgccctgtgattgcaatggtcgatcccaggaatgctacttcgaccctgaactctatcgttccactggccatgggggccactgtaccaactgccaggataacacagatggcgcccactgtgagaggtgccgagagaacttcttccgccttggcaacaatgaagcctgctcttcatgccactgtagtcctgtgggctctctaagcacacagtgtgatagttacggcagatgcagctgtaagccaggagtgatgggggacaaatgtgaccgttgccagcctggattccattctctcactgaagcaggatgcaggccatgctcttgtgatccctctggcagcatagatgaatgtaatgttgaaacaggaagatgtgtttgcaaagacaatgtcgaaggcttcaattgtgaaagatgcaaacctggattttttaatctggaatcatctaatcctcggggttgcacaccctgcttctgctttgggcattcttctgtctgtacaaacgctgttggctacagtgtttattctatctcctctacctttcagattgatgaggatgggtggcgtgcggaacagagagatggctctgaagcatctctcgagtggtcctctgagaggcaagatatcgccgtgatctcagacagctactttcctcggtacttcattgctcctgcaaagttcttgggcaagcaggtgttgagttatggtcagaacctctccttctcctttcgagtggacaggcgagatactcgcctctctgccgaagaccttgtgcttgagggagctggcttaagagtatctgtacccttgatcgctcagggcaattcctatccaagtgagaccactgtgaagtatgtcttcaggctccatgaagcaacagattacccttggaggcctgctcttaccccttttgaatttcagaagctcctaaacaacttgacctctatcaagatacgtgggacatacagtgagagaagtgctggatatttggatgatgtcaccctggcaagtgctcgtcctgggcctggagtccctgcaacttgggtggagtcctgcacctgtcctgtgggatatggagggcagttttgtgagatgtgcctctcaggttacagaagagaaactcctaatcttggaccatacagtccatgtgtgctttgcgcctgcaatggacacagcgagacctgtgatcctgagacaggtgtttgtaactgcagagacaatacggctggcccgcactgtgagaagtgcagtgatgggtactatggagattcaactgcaggcacctcctccgattgccaaccctgtccgtgtcctggaggttcaagttgtgctgttgttcccaagacaaaggaggtggtgtgcaccaactgtcctactggcaccactggtaagagatgtgagctctgtgatgatggctactttggagaccccctgggtagaaacggccctgtgagactttgccgcctgtgccagtgcagtgacaacatcgatcccaacgcagttggaaattgcaatcgcttgacgggagaatgcctgaagtgcatctataacactgctggcttctattgtgaccggtgcaaagacggattttttggaaatcccctggctcccaatccagcagacaaatgcaaagcctgcaattgcaatccgtatgggaccatgaagcagcagagcagctgtaaccccgtgacggggcagtgtgaatgtttgcctcacgtgactggccaggactgtggtgcttgtgaccctggattctacaatctgcagagtgggcaaggctgtgagaggtgtgactgccatgccttgggctccaccaatgggcagtgtgacatccgcaccggccagtgtgagtgccagcccggcatcactggtcagcactgtgagcgctgtgaggtcaaccactttgggtttggacctgaaggctgcaaaccctgtgactgtcatcctgagggatctctttcacttcagtgcaaagatgatggtcgctgtgaatgcagagaaggctttgtgggaaatcgctgtgaccagtgtgaagaaaactatttctacaatcggtcttggcctggctgccaggaatgtccagcttgttaccggctggtaaaggataaggttgctgatcatagagtgaagctccaggaattagagagtctcatagcaaaccttggaactggggatgagatggtgacagatcaagccttcgaggatagactaaaggaagcagagagggaagttatggacctccttcgtgaggcccaggatgtcaaagatgttgaccagaatttgatggatcgcctacagagagtgaataacactctgtccagccaaattagccgtttacagaatatccggaataccattgaagagactggaaacttggctgaacaagcgcgtgcccatgtagagaacacagagcggttgattgaaatcgcatccagagaacttgagaaagcaaaagtcgctgctgccaatgtgtcagtcactcagccagaatctacaggggacccaaacaacatgactcttttggcagaagaggctcgaaagcttgctgaacgtcataaacaggaagctgatgacattgttcgagtggcaaagacagccaatgatacgtcaactgaggcatacaacctgcttctgaggacactggcaggagaaaatcaaacagcatttgagattgaagagcttaataggaagtatgaacaagcgaagaacatctcacaggatctggaaaaacaagctgcccgagtacatgaggaggccaaaagggccggtgacaaagctgtggagatctatgccagcgtggctcagctgagccctttggactctgagacactggagaatgaagcaaataacataaagatggaagctgagaatctggaacaactgattgaccagaaattaaaagattatgaggacctcagagaagatatgagagggaaggaacttgaagtcaagaaccttctggagaaaggcaagactgaacagcagaccgcagaccaactcctagcccgagctgatgctgccaaggccctcgctgaagaagctgcaaagaagggacgggataccttacaagaagctaatgacattctcaacaacctgaaagattttgataggcgcgtgaacgataacaagacggccgcagaggaggcactaaggaagattcctgccatcaaccagaccatcactgaagccaatgaaaagaccagagaagcccagcaggccctgggcagtgctgcggcggatgccacagaggccaagaacaaggcccatgaggcggagaggatcgcaagcgctgtccaaaagaatgccaccagcaccaaggcagaagctgaaagaacttttgcagaagttacagatctggataatgaggtgaacaatatgttgaagcaactgcaggaagcagaaaaagagctaaagagaaaacaagatgacgctgaccaggacatgatgatggcagggatggcttcacaggctgctcaagaagccgagatcaatgccagaaaagccaaaaactctgttactagcctcctcagcattattaatgacctcttggagcagctggggcagctggatacagtggacctgaataagctaaacgagattgaaggcaccctaaacaaagccaaagatgaaatgaaggtcagcgatcttgataggaaagtgtctgacctggagaatgaagccaagaagcaggaggctgccatcatggactataaccgagatatcgaggagatcatgaaggacattcgcaatctggaggacatcaggaagaccttaccatctggctgcttcaacaccccgtccattgaaaagccctagtgtctttagggctggaaggcagcatccctctgacaggggggcagttgtgaggccacagagtgccttgacacaaagattacatttttcagacccccactcctctgctgctgtccatcactgtccttttgaaccaggaaaagtcacagagtttaaagagaagcaaattaaacatcctgaatcgggaacaaagggttttatctaataaagtgtctcttccatcacgttgctaccttacccacacttccctctgatttgcgtgaggacgtggcatcctacttacgtacgtggcataacacatcgtgtgagcccatgtatgctggggtagagcaagtagccctcccctgtctcatcgatccagcagaacctcctcagtctcagtactcttgtttctataaggaaaagttttgctactaacagtagcattgtgatggccagtatatccagtccatggataaagaaaatgcatctgcatctcctgcccctcttccttctaagcaaaaggaaataaacatcctgtgccaaaggtattggtcatttagaatgtcggtagccatccatcagtgcttttagctattatgagtgtaggacactgagccatccgtgggtcaggatgcaattatttataaaagtccccaggtgaacatggctgaagatttttctagtatattaataattgactaggaagatgaactttttttcagatctttgggcagctgataatttaaatctggatgggcagcttgcactcaccaatagaccaaaagacatcttttgatattcttataaatggaacttacacagaagaaatagggatatgataaccactaaagttttgttttcaaaatcaaactaattcttacagcttttttattagttagtcttggaactagtgttaagtatctggcagagaacagttaatccctaaggtcttgacaaaacagaagaaaaacaagcctcctcgtcctagtcttttctagcaaagggataaaacttagatggcagcttgtactgtcagaatcccgtgtatccatttgttcttctgttggagagatgagacatttgacccttagctccagttttcttctgatgtttccatcttccagaatccctcaaaaaacattgtttgccaaatcctggtggcaaatacttgcactcagtatttcacacagctgccaacgctatcgagttcctgcactttgtgatttaaatccactctaaaccttccctctaagtgtagagggaagacccttacgtggagtttcctagtgggcttctcaacttttgatcctcagctctgtggttttaagaccacagtgtgacagttccctgccacacacccccttcctcctaccaacccacctttgagattcatatatagcctttaacactatgcaactttgtactttgcgtagcaggggctggggtggggggaaagaaacctattatcatggacacactggtgctattaattatttcaaatttatatttttgtgtgaatgttttgtgttttgtttatccatgctatagaacaaggaatttatgtagatatacttagtcctatttctagaatgacactctgttcactttgctcaatttttcctcttcactggcacaagtatctgaatacctccttccctcccttctagagttctttggattgtactccaaagaattgtgccttgtgtttgcagcatctccattctctaaattaatataattgctttcctccacacccagccacgtaaagaggtaacttgggtcctcttccattgcagtcctgatgatcctaacctgcagcacggtggttttacaatgttccagagcaggaacgccaggttgacaagctatggtaggattaggaaagtttgctgaagaggatctttgacgccacagtgggactagccaggaatgagggagaaatgccctttttggcaattgttggagctggataggtaagttttataagggagtacattttgactgagcacttagggcatcaggaacagtgctacttactggtgggtagactgggagaggtggtgtaacttagttcttgatgatcccacttcctgtttccatctgcttgggatataccagagtttaccacaagtgttttgacgatatactcctgagctttcactctgctggcttctcccaggcctcttctactatggcaggagatgtggtgtgctgttgcaaagttttcacgtcatcgtttcctggctagttcatttcattaagtggctacatcctaacatatgcattggtcaaggttgcagcaagaggactgaagattgactgccaagctagtttgggtgaagttcactccagcaagtctcaggccacaatggggtggtttggtttggtttccttttaactttctttttgttatttgcttttctcctccacctgtgtggtatattttttaagcagaattttattttttaaaataaaaggttctttacaagatgataccttaattacactcccgcaacacagccattattttattgtctagctccagttatctgtattttatgtaatgtaattgacaggatggctgctgcagaatgctggttgacacagggattattatactgctatttttccctgaattcttttccttggaattccaactgtggaccttttatatgtgccttcactttagctgtttgccttactctacagccttgctctccggggtggttaataaaatgcaacacttggcatttttatgttataagaaaaacagtattttatttataataaaatctgaatattttgtaacccttta

SEQ ID NO: 270 - DNA, 1927 bp, Homo sapiens
agtgtgcctctgtcctttgccacaaacatgaggttcacattccctctcatggctatagtcctggaaattgccatgattgttttatttggattatttgttgagtatgaaacggaccagactgttctcgagcagctcaacatcaccaagccaacagacatgggcatattctttgagttatatcctctgttccaagatgtacatgttatgatatttgttgggtttggcttcctcatgaccttcctgaagaaatatggcttcagcagtgtgggtatcaacctactcgttgctgctttgggcctccagtggggcactattgtacagggaatcctgcaaagccagggacagaaatttaacattggaatcaaaaacatgataaatgcagacttcagtgcagccacagttctgatatcttttggagctgtcctgggaaaaacgagccccacccaaatgctgatcatgacaattttagaaattgttttctttgcccacaatgaatacctggttagtgaaatatttaaggcctctgacattggagcatcaatgacgatccatgcctttggggcctactttggcttggctgtagcaggcatcttgtatcgatctggactgagaaaggggcatgaaaatgaagagtccgcatactactcagacttgtttgcaatgattgggactctctttctgtggatgttttggcccagctttaactcggccattgctgaacctggagacaaacagtgcagggccattgtagacacgtacttctctctcgctgcctgtgtgctcacagcctttgccttctccagcctagtggagcaccgaggcaagctcaacatggttcacattcagaatgccacccttgctggaggagttgctgtgggcacttgtgcggatatggcaattcacccatttggttctatgattattgggagcattgcaggaatggtctctgtgcttggatacaagttcctgactccactttttactactaaactgaggatccatgatacatgtggggtccataacctccacggcttacctggtgtagtgggaggccttgcaggcattgtggcagtagcaatgggcgcctccaacacgtctatggccatgcaggcagctgcactgggttcctctatcggaacagcagttgttggaggtctgatgacaggtttaattctaaagttgcctctctggggacagccatctgaccagaactgctatgatgattctgtttattggaaggtccctaagacgagataacttgacaatcagttccatggacatggtgaccacagccagctggaacctgaagtctaaacaccattcctgctctccagcttcctttcccattatccagaatcaagtccaaataaacaaaaagggagtaaccaaagagagtatggaccagagtgaatagatcctaagtcccaaatggccagtgtaaaaatgtccttatgtctgatgctgtctcttgctcttcaatgattaattgaggggatgttactcataaaacagataatcaaatagatcttctccaggattcccaaaaagcttttggcagtgagtaaatacagagtaaacatgtcagtttcttaatgtagacactatgtcttcaatcccaaaaattataaaactgaaacccatgaagcaagaatagatgtgagaaatctatgtaaaaaaataattaaagaaatgcatgtgtgtaaagtagtaatatgatgattttaggtagtgctttttattttaaaaatagtctagttagtaatgttgtatccttgcatgaatattattcttaattccttttgcatgttgactatttgcaacgagctcaaatgctatctgatcaaagtctattttgcataaaatgtccaataattaaatattgttataaaataaaaaaaaaaaaaaaaaaaaaaaaaaaaaaaaaaaa

SEQ ID NO: 271 - DNA, 4224 bp, Homo sapiens
gatcgtctcaggtcagcggagggaggagacttatagacctatccagtcttcaaggtgctccagaaagcaggagttgaagacctgggtgtgagggacacatacatcctaaaagcaccacagcagaggaggcccaggcagtgccaggagtcaaggttcccagaagacaaaccccctaggaagacaggcgacctgtgaggccctagagcaccaccttaagagaagaagagctgtaagccggcctttgtcagagccatcatgggggacaaggatatgcctactgctgggatgccgagtcttctccagagttcctctgagagtcctcagagttatcctgagggggaggactcccagtctcctctccagattccccagagttctcctgagagcgacgacaccctgtatcctctccagagtcctcagagtcgttctgagggggaggactcctcggatcctctccagagacctcctgaggggaaggactcccagtctcctctccagattccccagagttctcctgagggcgacgacacccagtctcctctccagaattctcagagttctcctgaggggaaggactccctgtctcctctagagatttctcagagccctcctgagggtgaggatgtccagtctcctctgcagaatcctgcgagttccttcttctcctctgctttattgagtattttccagagttcccctgagagtattcaaagtccttttgagggttttccccagtctgttctccagattcctgtgagcgccgcctcctcctccactttagtgagtattttccagagttcccctgagagtactcaaagtccttttgagggttttccccagtctccactccagattcctgtgagccgctccttctcctccactttattgagtattttccagagttcccctgagagaagtcagagaacttctgagggttttgcacagtctcctctccagattcctgtgagctcctcctcgtcctccactttactgagtcttttccagagttcccctgagagaactcagagtacttttgagggttttccccagtctccactccagattcctgtgagccgctccttctcctccactttattgagtattttccagagttcccctgagagaactcagagtacttttgagggttttgcccagtctcctctccagattcctgtgagctcctcctcctcctccactttattgagtcttttccagagttcccctgagagaactcagagtacttttgagggttttccccagtctcttctccagattcctatgacctcctccttctcctctactttattgagtattttccagagttctcctgagagtgctcaaagtacttttgagggttttccccagtctcctctccagattcctgggagcccctccttctcctccactttactgagtcttttccagagttcccctgagagaactcacagtacttttgagggttttccccagtctcctctccagattcctatgacctcctccttctcctctactttattgagtattttacagagttctcctgagagtgctcaaagtgcttttgagggttttccccagtctcctctccagattcctgtgagctcctctttctcctacactttattgagtcttttccagagttcccctgagagaactcagagtacttttgagggttttccccagtctcctctccagattcctgtgagctcctcctcctcctcctccactttattgagtcttttccagagttcccctgagtgtactcaaagtacttttgagggttttccccagtctcctctccagattcctcagagtcctcctgaaggggagaatacccattctcctctccagattgttccaagtcttcctgagtgggaggactccctgtctcctcactactttcctcagagccctcctcagggggaggactccctatctcctcactactttcctcagagccctcctcagggggaggactccctgtctcctcactactttcctcagagccctcagggggaggactccctgtctcctcactactttcctcagagccctcctcagggggaggactccatgtctcctctctactttcctcagagtcctcttcagggggaggaattccagtcttctctccagagccctgtgagcatctgctcctcctccactccatccagtcttccccagagtttccctgagagttctcagagtcctcctgaggggcctgtccagtctcctctccatagtcctcagagccctcctgaggggatgcactcccaatctcctctccagagtcctgagagtgctcctgagggggaggattccctgtctcctctccaaattcctcagagtcctcttgagggagaggactccctgtcttctctccattttcctcagagtcctcctgagtgggaggactccctctctcctctccactttcctcagtttcctcctcagggggaggacttccagtcttctctccagagtcctgtgagtatctgctcctcctccacttctttgagtcttccccagagtttccctgagagtcctcagagtcctcctgaggggcctgctcagtctcctctccagagacctgtcagctccttcttctcctacactttagcgagtcttctccaaagttcccatgagagtcctcagagtcctcctgaggggcctgcccagtctcctctccagagtcctgtgagctccttcccctcctccacttcatcgagtctttcccagagttctcctgtgagctccttcccctcctccacttcatcgagtctttccaagagttcccctgagagtcctctccagagtcctgtgatctccttctcctcctccacttcattgagcccattcagtgaagagtccagcagcccagtagatgaatatacaagttcctcagacaccttgctagagagtgattccttgacagacagcgagtccttgatagagagcgagcccttgttcacttatacactggatgaaaaggtggacgagttggcgcggtttcttctcctcaaatatcaagtgaagcagcctatcacaaaggcagagatgctgacgaatgtcatcagcaggtacacgggctactttcctgtgatcttcaggaaagcccgtgagttcatagagatactttttggcatttccctgagagaagtggaccctgatgactcctatgtctttgtaaacacattagacctcacctctgaggggtgtctgagtgatgagcagggcatgtcccagaaccgcctcctgattcttattctgagtatcatcttcataaagggcacctatgcctctgaggaggtcatctgggatgtgctgagtggaataggggtgcgtgctgggagggagcactttgcctttggggagcccagggagctcctcactaaagtttgggtgcaggaacattacctagagtaccgggaggtgcccaactcttctcctcctcgttacgaattcctgtggggtccaagagctcattcagaagtcattaagaggaaagtagtagagtttttggccatgctaaagaataccgtccctattacctttccatcctcttacaaggatgctttgaaagatgtggaagagagagcccaggccataattgacaccacagatgattcgactgccacagaaagtgcaagctccagtgtcatgtcccccagcttctcttctgagtgaagtctagggcagattcttccctctgagtttgaagggggcagtcgagtttctacgtggtggagggcctggttgaggctggagagaacacagtgctatttgcatttctgttccatatgggtagttatggggtttacctgttttacttttgggtatttttcaaatgcttttcctattaataacaggtttaaatagcttcagaatcctagtttatgcacatgagtcgcacatgtattgctgtttttctggtttaagagtaacagtttgatattttgtaaaaacaaaaacacacccaaacacaccacattgggaaaaccttctgcctcattttgtgatgtgtcacaggttaatgtggtgttactgtaggaattttcttgaaactgtgaaggaactctgcagttaaatagtggaataaagtaaaggattgttaatgtttgcatttcctcaggtcctttagtctgttgttcttgaaaactaaagatacatacctggtttgcttggcttacgtaagaaagtagaagaaagtaaactgtaataaataaa

SEQ ID NO: 272 - DNA, 1807 bp, Homo sapiens
  misc_feature (29)..(29): n is a, c, g, or t
  misc_feature (32)..(32): n is a, c, g, or t
  misc_feature (34)..(34): n is a, c, g, or t
  misc_feature (59)..(59): n is a, c, g, or t
  misc_feature (61)..(61): n is a, c, g, or t
  misc_feature (67)..(67): n is a, c, g, or t
  misc_feature (69)..(69): n is a, c, g, or t
  misc_feature (318)..(318): n is a, c, g, or t
  misc_feature (373)..(373): n is a, c, g, or t
  misc_feature (527)..(528): n is a, c, g, or t
  misc_feature (533)..(533): n is a, c, g, or t
  misc_feature (606)..(606): n is a, c, g, or t
  misc_feature (681)..(682): n is a, c, g, or t
  misc_feature (689)..(689): n is a, c, g, or t
  misc_feature (880)..(880): n is a, c, g, or t
  misc_feature (934)..(934): n is a, c, g, or t
  misc_feature (1214)..(1214): n is a, c, g, or t
  misc_feature (1331)..(1331): n is a, c, g, or t
  misc_feature (1348)..(1348): n is a, c, g, or t
  misc_feature (1353)..(1353): n is a, c, g, or t
gtgtggggctggactctgaggcggccagntangngaacggttatcctgggcacaccagngntggtgnangtcctgagtcatgctccctgggtagggcatccagctcccagcctgggagtgctgagagccaaatccaccgtagagcaggggtgagagtcagggtcccacctcctctatctgccggcaatccagtggtgacctagggtaaaagcttgagagtcccatacacacggtcatcccacgacatacctcacaggccaggcagggacacacagcccccttccctccctcccaggtaccgtcatagctgctagtgtnactgaaggcagtgtccctggccccagctgaagcaccgtagccagccagcgggctncacgcaccttggcctgttgctcctagggtcacttgtgccattcagccaaggggacgaccgtgcctgctggcccagctgagctccgcccagtgagcccaccccccattctcctgccactgactctcgctcttctgcttttcccagcaggaagggnncagcntcacctacgagacctgcagccccccgaccagctgaggctcccctcttagacttataagtctatggccactggnatccggctgcctgccctccctgcctcccccagggtcccttcagagggtcctgggttttctgaacacccagagggnnctccggngctccctccagccatcccttttagtttcaccctcctggttcaagcagtgttctttctctatcaggcctggtggctgttgcatggggctccccaaggcaaggggtggccccaggccagtgggttggaagacagggtgaccagagaagagggaagcccgagggggccgagcatcagcctgaattgcgggtgcnctgcctgggtgccgtgtgagaggccagcgtgtgtggggtggggagggccgccanagcccccaggcgctatctgtgaagctacggctcctccctccatcttcctcccctttcccttccagccccttttccaggaaccttgccacacccacacctgcagcctcccctccccggccctcccaccactgctgcggcgcggccggccccggccgtgtgctgcgcttgccttaccagctctctcctcgcttttctctcccgttttctctctgctttctctccaactgccagccgatcgggtcaggcaagtccatcccgtcctgagagccccaggcccccnttcgacctctaaacagatccctcctcttctcggagacctccctttccaagcctgcctggacggctgttctgtgacttgacagtggctcccccagccccaaagccagcccccttcatnctgtgacttaatctgtngtagntggtgagctgatacattcaggtgtgaccgttggtgaaaacttgtgccccttctgtggtatgcccttgccctgttctataaatatctataaatactcatatatatacacacctacacatggccaaccgcctcgcctctagcgctgggaatcagtcactgtgctatccttgtggagtcttgtggcccaactaccagagaacgctgtcccccgacatcccactccaaagtgtgccacctccagtgagcctccttgtcatgcccggcctgtggacagccagcccccgccatccctcccaccccctaccaagcatgggggtgctgtgcaggcagccgtgtggcctgacagtttctaccagtcctgctgtccctcggctgagaataaaacccatttctggatgatggggaatgaaaaaaaaaaaaaaaaaaaaaaaaaaaaaaaaaaaaaaaaaaaaaaa

SEQ ID NO: 273 - DNA, 3023 bp, Homo sapiens
gagcgggcgagggagcgcgcgcggccgccacaaagctcgggcgccgcggggctgcatgcggcgtacctggcccggcgcggcgactgctctccgggctggcgggggccggccgcgagccccgggggccccgaggccgcagcttgcctgcgcgctctgagccttcgcaactcgcgagcaaagtttggtggaggcaacgccaagcctgagtcctttcttcctctcgttccccaaatccgagggcagcccgcgggcgtcatgcccgcgctcctccgcagcctggggtacgcgtgaagcccgggaggcttggcgccggcgaagacccaaggaccactcttctgcgtttggagttgctccccacaaccccgggctcgtcgctttctccatcccgacccacgcggggcgcggggacaacacaggtcgcggaggagcgttgccattcaagtgactgcagcagcagcggcagcgcctcggttcctgagcccaccgcaggctgaaggcattgcgcgtagtccatgcccgtagaggaagtgtgcagatgggattaacgtccacatggagatatggaagaggaccggggattggtaccgtaaccatggtcagctggggtcgtttcatctgcctggtcgtggtcaccatggcaaccttgtccctggcccggccctccttcagtttagttgaggataccacattagagccagaagatgccatctcatccggagatgatgaggatgacaccgatggtgcggaagattttgtcagtgagaacagtaacaacaagagagcaccatactggaccaacacagaaaagatggaaaagcggctccatgctgtgcctgcggccaacactgtcaagtttcgctgcccagccggggggaacccaatgccaaccatgcggtggctgaaaaacgggaaggagtttaagcaggagcatcgcattggaggctacaaggtacgaaaccagcactggagcctcattatggaaagtgtggtcccatctgacaagggaaattatacctgtgtggtggagaatgaatacgggtccatcaatcacacgtaccacctggatgttgtggagcgatcgcctcaccggcccatcctccaagccggactgccggcaaatgcctccacagtggtcggaggagacgtagagtttgtctgcaaggtttacagtgatgcccagccccacatccagtggatcaagcacgtggaaaagaacggcagtaaatacgggcccgacgggctgccctacctcaaggttctcaagcactcggggataaatagttccaatgcagaagtgctggctctgttcaatgtgaccgaggcggatgctggggaatatatatgtaaggtctccaattatatagggcaggccaaccagtctgcctggctcactgtcctgccaaaacagcaagcgcctggaagagaaaaggagattacagcttccccagactacctggagatagccatttactgcataggggtcttcttaatcgcctgtatggtggtaacagtcatcctgtgccgaatgaagaacacgaccaagaagccagacttcagcagccagccggctgtgcacaagctgaccaaacgtatccccctgcggagacaggtttcggctgagtccagctcctccatgaactccaacaccccgctggtgaggataacaacacgcctctcttcaacggcagacacccccatgctggcaggggtctccgagtatgaacttccagaggacccaaaatgggagtttccaagagataagctgacactgggcaagcccctgggagaaggttgctttgggcaagtggtcatggcggaagcagtgggaattgacaaagacaagcccaaggaggcggtcaccgtggccgtgaagatgttgaaagatgatgccacagagaaagacctttctgatctggtgtcagagatggagatgatgaagatgattgggaaacacaagaatatcataaatcttcttggagcctgcacacaggatgggcctctctatgtcatagttgagtatgcctctaaaggcaacctccgagaatacctccgagcccggaggccacccgggatggagtactcctatgacattaaccgtgttcctgaggagcagatgaccttcaaggacttggtgtcatgcacctaccagctggccagaggcatggagtacttggcttcccaaaaatgtattcatcgagatttagcagccagaaatgttttggtaacagaaaacaatgtgatgaaaatagcagactttggactcgccagagatatcaacaatatagactattacaaaaagaccaccaatgggcggcttccagtcaagtggatggctccagaagccctgtttgatagagtatacactcatcagagtgatgtctggtccttcggggtgttaatgtgggagatcttcactttagggggctcgccctacccagggattcccgtggaggaactttttaagctgctgaaggaaggacacagaatggataagccagccaactgcaccaacgaactgtacatgatgatgagggactgttggcatgcagtgccctcccagagaccaacgttcaagcagttggtagaagacttggatcgaattccccccaacccttcccttatgagcatttttagaaaatagtcttagccaatgttctaaaatgctcataaggaagggttggggaattaccctttagacacaagctctaagaactctggatacaacgggaacttggatggatacagtctgggcctgctgggccagatgttccgagggcggcccggcaagcagcctgtcttgcacattgcaactgactggcttaatctacggcaagagtccttcagctccgtcacagagtactctccaatgtgttatagttatccttaaagctcttcaattcaaggaagtgcttggcacgtttactcttctgactggaggggaggtatgtcacctggatggttgttggggagacctcaggggactgagttaggtctttggctgctgactggtgatgtcgctgagg

SEQ ID NO: 274 - DNA, 1704 bp, Homo sapiens
cagtcaccggtaagttactgaatctgcgttggctgcctttcatgccactggtgctcctttgtggctatggaccagtggggggtgtatttcaatcctgtgcttgtttctttttgtcagagtttctttggttatcccctgagcatcttcttcatcgtggtcaatgagttttgcgaaagattttcctactatggaatgcgagcaatcctgattctgtacttcacaaatttcatcagctgggatgataacctgtccaccgccatctaccatacgtttgtggctctgtgctacctgacgccaattctcggagctcttatcgccgactcgtggctgggaaagttcaagaccattgtgtcgctctccattgtctacacaattggacaagcagtcacctcagtaagctccattaatgacctcacagaccacaaccatgatggcacccccgacagccttcctgtgcacgtggtgctgtccttgatcggcctggccctgatagctctcgggactggaggaatcaaaccctgtgtgtctgcgtttggtggagatcagtttgaagagggccaggagaaacaaagaaacagatttttttccatcttttacttggctattaatgctggaagtttgctttccacaatcatcacacccatgctcagaggtaagagatacctgaaaggaacttctgttggtcttttttagtaaggccaagtccgtgtcttcttcgttttgttctgttcttcccttctgccctgttttctagctgtcagctacatgctgggatgcacgttggaatctggagtaagtgcttccttccctgtgagtttcacctcctttttgtcttatttaaatcctcttatcccagtgaccactggagagtctaagccatccttagcatgggcatccatcttcctaaactgttattcatgcaaagtcatgctcgtggtaagaggtaagaggcaagagaggtgccttggaagccaagctggtggccgtagctgccattttagccttcaagctttgctccccagtgatatttctgtgacttagaagagttactggagtcaaaattgtattgattttttgtttgttttgttttgtttttagaaggagtcttgctctgtcacccagcctggaggcagtggcgtgatcttggctcactgcaacctccacctcctgggttcaagcaattctcctgcctcagcctcctgagtagctgggacaacaggcgcctgccaccatgcccggataatattttttgtatttttagtagagatgggatttcaccatgttagccaggatggtctcgatctcctgccctcgtgatctgcctgccttggcctcccaaagtgctgggattacaggtgtgagccaccacgcctggctaaggcaaagtttttttctttgctttcccatcatctcaagtatttccaaaagaactgctcagataaagagaatgggacagtgtcagtaactatcagaggtttgtgcttgctaatgctccatagagagtttgtgaatttcccatgtggaagggaatatgtggtgttactggtgacaaactaacaagaccatcctgtccacatttgaatcagattagattatgaaataaagatttcaggagaattgcttgaacctggtagacgggggttgcagtgagctgagatcgtgctgctgcactccagcctagcccacagagcaagactctgtctc

SEQ ID NO: 275 - DNA, 1375 bp, Homo sapiens
tcgaattccggaagccgctcccgacaccctttgcctggctctgtccatattagttcccaggcggccgtcgcgttccagcagcggcacgcagcgcaggcggagcggcagcggggcctcggctctatagagccgagccgctggtacccgcccggtaccgcgcgagccagtgcccctggatcttgcctctgctccgacgccgttccccaccagttagcgacagcgcccgcccctctgaggagacacgaaggtggttccccagccgctcaaatttccggaccaccgcgctttcccctcctcagcctgggctgtgctctctctagaatcctcgggcccccactttcttcccaaactcatcctaaatctctcacacacgcgagtgttcccagccctcaagccagctgctcctcctccgttcattttctgcccctcttcgcaaagcacccccgggatcatcctccgagggcgactttttgagaaatctcggtggagtagtggaccagagcaggggagtttttaaaagccggggcgcgagaaacaggaaggtactatggcttcctcgtctggcaacgatgatgatctcactatccccagagctgctatcaataaaatgatcaaagagactcttcctaatgtccgggtggccaacgatgctcgagagctggtggtgaactgctgcactgaattcattcaccttatatcttctgaagccaatgagatttgtaacaaatcggaaaagaagaccatctcaccagagcatgtcatacaagcactagaaagtttgggatttggctcttacatcagtgaagtaaaagaagtcttgcaagagtgtaaaacagtagcattaaaaagaagaaaggccagttctcgtttggaaaaccttggcattcctgaagaagagttattgagacagcaacaagaattatttgcaaaagctagacagcaacaagcagaattggcccaacaggaatggcttcaaatgcagcaagctgcccaacaagcccagcttgctgctgcctcagccagtgcatctaatcaggcgggatcttctcaggatgaagaagatgatgatgatatctgaaattcaccagctgagtttctatttcttctataaatgtttttccctgcacaacaaaaacagtgaaagaaatgcttatctgtaattttgtatgcatcttggtggacttgtcattggtattctagagatgtctgctataagtttcatctgttgtgtgctatacatgtaaaaactgtctctttgaactattgaaaatttaaggttcagtataatatcaattttgaatttttcctggtgtttatgaaattttagatagcagcaagtcttcgtttgatcataaacagtgtacagataactcaa

SEQ ID NO: 276 - DNA, 1588 bp, Homo sapiens
ggcacgaggctggcatctggagggaccaccgttgccgcgtcttcggcttccacgatctgcgttcgggctacgcggccacggcggcagccactgcgactcccactgtgcctggctctgtccatattagttcccaggcggccgtcgccgttccagcagcggcagcggcagcggcagcggcggacatgttgtgaggcggcggcgcgggtgtctgaaggatggtttggccgaggcggcggcaacggctgctggcggcggcggcagcggcagcggggcctcgggctctatagagccgagcccgctgggtacccgcccggtaccgcgacgaggccagtgcccctggatcttgcctctgctccgacgccgttggggaccagttaggcgacagcgcccgcccctctgaggagacacgaaggtggttccccagctgctcaaatttccggaccaccgcgctttcccctcctcagcctgggctgtgctctctctagaatcctcgggcccccactttcttcccaaactcatcctaaatctctcacacacgcgagtgttcccagccctcaagccagctgctcctccgttcattttctgcaccctcttcgcaaagcaccccccgggatcactctccgagggcgactttttgagaaatctcggtggagtagtggaccagagctggggagtttttaaaagccggggcgcgagaaacaggaaggtactatggcttcctcgtctggcaacgatgatgatctcactatccccagagctgctatcaataaaatgatcaaagagactcttcctaatgtccgggtggccaacgatgctcgagagctggtggtgaactgctgcactgaattcattcaccttatatcttctgaagccaatgagatttgtaacaaatcggaaaagaagaccatctcaccagagcatgtcatacaagcactagaaagtttgggatttggctcttacatcagtgaagtaaaagaagtcttgcaagagtgtaaaacagtagcattaaaaagaagaaaggccagttctcgtttggaaaaccttggcattcctgaagaagagttattgagacagcaacaagaattatttgcaaaagctagacagcaacaagcagaattggcccaacaggaatggcttcaaatgcagcaagctgcccaacaagcccagcttgctgctgcctcagccagtgcatctaatcaggcgggatcttctcaggatgaagaagatgatgatgatatctgaaattcaccagctgagtttctatttcttctataaatgtttttccctgcacaacaaaaacagtgaaagaaatgcttatctgtaattttgtatgcatcttggtggacttgtcattggtattctagggatgtctgctattaagtttcatctattgtgtgctatacatgtaaaaactgtctctttgaactattgaaaatttaaggttcagtataatatcaattttgaatttttaatggtgtttatgaaattttagatagcagcgagtccttcgtttgatcaataaacagtgttacagataaaaaaaaaaaaaaaaaaaaaaaaaaaaaaaaaaaaaaaaaaaaaaaaaaaa

SEQ ID NO: 277 - DNA, 1252 bp, Homo sapiens
aacctatcataggcactaaagaggaaaagcctttgaagcaggcattagtacatgcagtgttataattcatatgaatatgaggtacaaaagaagaggtgttgatgttttaaaaacattaatggctatttattgatattgcagaccacctagaggatgctaaattgaacatttagtgacagaagattttctcctggatactttaaatacataaaaacttggcagagtttttatgaaatataaattttattgtattcatttacatattaaaaaatagactcagaggcggaaaaacttccttgaaattgtttgtcatttgttctacagttacttactgaagtcattactatttaccaagcatcatgctaggtgctaggcttacaagagtgaacaaggagacagggttcctgtcattatagagcttaatctactggggaagattgagtgggaaagattgacttaaataaaacagtaagttcagaaagttaggaagtgttggagtctatatttaaacttaggtattttgacccaaaagcctgtactgtttctaacataccatgctgatgctctagcctccattttatatgcttaaacttattatggggcttttaaatagaatatgtattatccttgccagggcaaaatataaagaaataattgactgcctgctatatctgtcttcacctttctatccctattatctgtttttttattcctcttttttgtctcccttgtttcttaccctgacttatgtatgaagatctctagtatttctttactattgtgaggatgaccagcggagaggctagacagcaacaagcagaattggcccaacaggaatggcttcaaatgcagcaagctgcccaacaagcccagcttgctgctgcctcagccagtgcatctaatcaggcgggatcttctcaggatgaagaagatgatgatgatatctgaaattcaccagctgagtttctatttcttctataaatgtttttccctgcacaacaaaaacagtgaaagaaatgcttatctgtaattttgtatgcatcttggtggacttgtcattggtattctagggatgtctgctattaagtttcatctattgtgtgctatacatgtaaaaactgtctctttgaactattgaaaatttaaggttcagtataatatcaattttgaatttttaatggtgtttatgaaattttagatagcagcgagtccttcgtttgatcaataaacagtgttacagataaaaaaaaaa

SEQ ID NO: 278 - DNA, 576 bp, Homo sapiens
aggcaactgaaaggatgaaatcactgacttggatcttgggcctttgggctcttgcagcgtgtttcacacctggtgagagtcaaagaggccccaggggaccatatccacctggaccactggctcctcctcctccaccacgttttccttttggaacaggatttgttccaccaccccatcctccaccctatggtccagggagatttccaccacccctttctccaccctatggtccagggagaatcccaccatcccctcctccaccctatggtccagggagaattcaatcacactctcttcctcctccttatggcccaggttatccacagccaccttcccaaccaagaccctatccacctggacctccatttttccctgtaaattctccaactgatcctgccctccctactcttgcaccctaaatacagacaactgcaacaggtgccaccacccacaaaagacaacactaccctcgtaactactgcttctactacccaaaaataagaatttcaacactacttccaagagacttttagataaaatcacttccatttttggatgagaataaagatttccaaa

SEQ ID NO: 279 - DNA, 576 bp, Homo sapiens; identical to SEQ ID NO: 278

SEQ ID NO: 280 - DNA, 1104 bp, Homo sapiens
  misc_feature (517)..(517): n is a, c, g, or t
  misc_feature (1019)..(1019): n is a, c, g, or t
cacttcggaggattgctcaacaaccatgctgggcatctggaccctcctacctctggttcttacgtctgttgctagattatcgtccaaaagtgttaatgcccaagtgactgacatcaactccaagggattggaattgaggaagactgttactacagttgagactcagaacttggaaggcctgcatcatgatggccaattctgccataagccctgtcctccaggtgaaaggaaagctagggactgcacagtcaatggggatgaaccagactgcgtgccctgccaagaagggaaggagtacacagacaaagcccatttttcttccaaatgcagaagatgtagattgtgtgatgaaggacatggcttagaagtggaaataaactgcacccggacccagaataccaagtgcagatgtaaaccaaactttttttgtaactctactgtatgtgaacactgtgacccttgcaccaaatgtgaacatggaatcatcaaggaatgcacactcaccagcaacaccaantgcaaagaggaagtgaagagaaaggaagtacagaaaacatgcagaaagcacagaaaggaaaaccaaggttctcatgaatctccaaccttaaatcctgaaacagtggcaataaatttatctgatgttgacttgagtaaatatatcaccactattgctggagtcatgacactaagtcaagttaaaggctttgttcgaaagaatggtgtcaatgaagccaaaatagatgagatcaagaatgacaatgtccaagacacagcagaacagaaagttcaactgcttcgtaattggcatcaacttcatggaaagaaagaagcgtatgacacattgattaaagatctcaaaaaagccaatctttgtactcttgcagagaaaattcagactatcatcctcaaggacattactagtgactcagaaaattcaaacttcagaaatgaaatccaaagcttggtctagagtgaaaaacaacaaattcagttctgagtatatgcaattagtgtttganaagattcttaatagctggctgtaaatactgcttggttttttactgggtacattttatcatttattagcgctgaagagccaacata

SEQ ID NO: 281 - DNA, 1035 bp, Homo sapiens
  misc_feature (11)..(11): n is a, c, g, or t
  misc_feature (34)..(34): n is a, c, g, or t
  misc_feature (51)..(51): n is a, c, g, or t
  misc_feature (109)..(109): n is a, c, g, or t
  misc_feature (136)..(164): n is a, c, g, or t
  misc_feature (303)..(303): n is a, c, g, or t
  misc_feature (319)..(320): n is a, c, g, or t
ctcgtgcgccntcaggcccgggtgctcagaacgntggaggacttgcttttnttgggccttgatgcgaagtgctgaccccgctgggcaggcggggcagctccggcgctcntcggagaccactgcgctccacgttgannnnnnnnnnnnnnnnnnnnnnnnnnnnnggttcttacgtctgttgctagattatcgtccaaaagtgttaatgcccaagtgactgacatcaactccaagggattggaattgaggaagactgttactacagttgagactcagaacttggaaggcctgcatcatgatggnccaattctgccataanncctgtcctccaggtgaaaggaaagctagggactgcacagtcaatggggatgaaccagactgcgtgccctgccaagaagggaaggagtacacagacaaagcccatttttcttccaaatgcagaagatgtagattgtgtgatgaaggacatgatgtgaacatggaatcatcaaggaatgcacactcaccagcaacaccaagtgcaaagaggaaggatccagatctaacttggggtggctttgtcttcttcttttgccaattccactaattgtttgggtgaagagaaaggaagtacagaaaacatgcagaaagcacagaaaggaaaaccaaggttctcatgaatctccaaccttaaatcctgaaacagtggcaataaatttatctgatgttgacttgagtaaatatatcaccactattgctggagtcatgacactaagtcaagttaaaggctttgttcgaaagaatggtgtcaatgaagccaaaatagatgagatcaagaatgacaatgtccaagacacagcagaacagaaagttcaactgcttcgtaattggcatcaacttcatggaaagaaagaagcgtatgacacattgattaaagatctcaaaaaagccaatctttgtactcttgcagagaaaattcagactatcatcctcaaggacattactagtgactcagaaaattcaaacttcagaaatgaaatccaaagcttggtctag

SEQ ID NO: 282 - DNA, 2427 bp, Homo sapiens
gcggcgccgcaggggattgaggggttgactgagcgttgcgagccttagctttctcccgaacgccagcgctgaggacacgatgtcgcggctctcccgctcactgctttgggccgccacctgcctgggcgtgctctgcgtgctgtccgcggacaagaacacgacccagcacccgaacgtgacgactttagcgcccatctccaacgtaacctcggcgccggtgacgtccctcccgctggtcaccactccggcaccagaaacctgtgaaggtcgaaacagctgcgtttcctgttttaatgttagcgttgttaatactacctgcttttggatagaatgtaaagatgagagctattgttcacataactcaacagttagtgattgtcaagtggggaacacgacagacttctgttccgtttccacggccactccagtgccaacagccaattctacagctaaacccacagttcagccctccccttctacaacttccaagacagttactacatcaggtacaacaaataacactgtgactccaacctcacaacctgtgcgaaagtctacctttgatgcagccagtttcattggaggaattgtcctggtcttggaaataagatgccacacaaggaactacattccagatttaaagaaatgaaaggataccattagtgtgtataacagattattgttcatacttgtaaagcaccttatgtcattgagaatataaagaacagtgccttagaagacagtgaaaggtaagctctagcttaatgtctatgatttgttctttgacattaaggaaggtaaggattggtcagaggatgtaacttgatgtgagcagtagtaaacctgttttagatatcatactgttaatattttattgaaaatttatttcagagcggagaaacttaagctaaagtctgttatacagaattgaaagccttcgtatcttgaacctcccaacatttttcttatggctgttgaaaagtatagagctaaattgatttaattacactttcctttgtactttaaaaaaaagtatgctagcactattgtaccttgaaaggatttccaccagactgtcttgagtagtgacttctttggtgaggcaagaaggatatacattattttagaatcatttactatttaaatgagacaatcatattattttagaatcatttattttaaatgagacaatcattttaagttttaagataacagaagtgaccaatgtaatttcacaacacctaaggattttttggttgatcaggttactgtagatttttactgattgtcctggatgaatagactgtgctttttctttttctctcccttccttcttggtttcccatagtataataagcatgcatactttaacttctatagttttctcctttagagggtcttcttcagttttagaggtttacttctcccttgcctttgactcattggactagtgcagaggctttaagtagtttaaaatgggcttttgcttttctaggtcattaacgttttttatttagtttctttagccaatagtggctgagtttcgcacttgattttcaatattttatagtaagaaatgacaaactgctttggttcatttcataaacaaactctgcatttagataactattaaaggttgttaagatgaagatttactgtttctttgttactcgttggtacagctgtttgttttacttgcacatttgtagatatacttaatgttttcaagtgccttaattgtttaaaatctctggcttcaaagtttcttggggaaaggtcggtttacctcacattttttgtttccattagtaatattctaggtacctcacaaaatgtattatggtgccatggctgttagtttttagtgagtgctgtaggattaattcgaaaataggcagaattccattcctcccaaggtggcaaaaattagctatactgatgtaattgtcatttacctgggtatgaattccctgacacacattcatgtcaacatatgtagcaaattttgtgaaaacacaacaatttgaagcttctgtaattttgagcactgctctaacaacaagcataatataaaattagttagattttgcaagtctacaaatgagctcttgcaacagaactcacagcctttttacttttttcccctaactttagcaatgtagtatcttgagccattaatttttgggtttttttaaaatccagaaggtatatagaaaccttttcagatttttcatctgatttgttcttgcagatgttcttctatcaaataccttattttaccttacagatatttgttgcacaggcagatactgctgtatttagacatttctatttcagttcattaaaaactgcaaaaccaatctgtatcatgtaccaaactgacttaaaataaatctacatgtttattgaattaaaacaaaaaaaaaa

SEQ ID NO: 283 - DNA, 348 bp, Homo sapiens
  misc_feature (159)..(163): n is a, c, g, or t
  misc_feature (165)..(165): n is a, c, g, or t
  misc_feature (167)..(167): n is a, c, g, or t
  misc_feature (171)..(186): n is a, c, g, or t
  misc_feature (188)..(188): n is a, c, g, or t
  misc_feature (190)..(190): n is a, c, g, or t
  misc_feature (193)..(193): n is a, c, g, or t
  misc_feature (196)..(197): n is a, c, g, or t
  misc_feature (199)..(205): n is a, c, g, or t
atgtgcctcagacttctctgctgtgtggccatttctttctggggagccaggctccacggacaccaaggtcacccagagacctagacttctggtcaaagcaagtgaacagaaagcaaagatggattgtgttcctataaaagcacatagttatgtttactnnnnncntnagannnnnnnnnnnnnnnncnanttnttnntnnnnnnncagaatgaagaacttattcagaaagcagaaataatcaatgagcgatttttagcccaatgctccaaaaactcatcctgtaccttggagatccagtccacggagtcaggggacacagcactgtatttctgtgccagcagcaaagc

SEQ ID NO: 284 - DNA, 2637 bp, Homo sapiens
ttcgatgtgggctcagagaagacacgaattggtcttgcacagtatagtggtgaccccagaatagaatggcacttgaatgcatttagcacaaaagatgaagtgattgaagctgtccgaaacctcccatataaaggaggaaatacactaacaggtcttgctttgaactacatttttgaaaatagcttcaaaccagaagcaggatcaaggactggagtatccaaaattggcattttaatcacagatggaaaatcccaagatgacattattccaccatctagaaatcttcgtgagtctggtgtagaactgtttgccataggggtgaaaaacgcggatgtgaatgagctgcaggagatcgcctctgaaccagacagcactcatgtgtacaatgttgccgaattcgatctgatgcacacagttgtggagagtctgaccaggactctctgctctagagtggaagaacaggacagagaaattaaagcctcagcccatgccatcactgggccgcctacggagttgattacttctgaagtcactgccagaagctttatggttaactggactcatgccccaggaaatgtggaaaaatacagagttgtgtattatcctaccaggggtggaaaaccagacgaggtggtggtagatggaactgtatcttccacagtgttgaaaaacttgatgtctttaactgaatatcagatagcagtctttgcaatctatgcccacactgctagtgaaggcctacggggaactgaaactacacttgctttaccgatggcttctgaccttctactgtacgacgtgactgagaacagcatgcgagtcaaatgggatgcagtgcctggggcctcaggttacctgatcctttatgctcctctaacagagggcctggctggggatgaaaaagagatgaaaattggagagacccacacagatattgaattgagtgggttgttgcccaatacagaatacacagtcacagtttatgccatgtttggagaagaggccagtgatcctgttacgggacaagaaacaacattggctttaagtccaccaagaaacctgagaatctccaatgttggctctaacagtgctcgattaacctgggacccaacttcaagacagatcaatggttatcgaattgtatataacaatgcagatgggactgaaatcaatgaggttgaagtcgatcctattactaccttccctctgaagggcttgacacctctcacagagtatactattgctattttctccatctatgatgaaggacagtcagagcctctgattggagtttttaccaccgaggaagttccagcccagcaatacttagaaattgatgaggtgacgacagacagttttagggtgacctggcatcccctctcagctgatgaagggctacacaaattgatgtggattccagtctatggggggaagactgaggaggttgtcctgaaagaagagcaggactcacatgttattgaaggcctggagcccggtacggagtatgaagtttcactattggccgtacttgatgatggaagcgagagtgaggtggtgactgctgtcgggaccacacttgacagtttttggacagaaccagctacaaccatagtgcctaccacatctgtgacttcagttttccagacgggaatcagaaacctagttgtaggtgatgaaactacttctagcctgcgggtaaaatgggacatttctgacagcgatgtgcagcagtttagggtgacctacatgacagctcaaggggaccctgaggaagaagtcataggaacggttatggtgcctggaagccagaacaacctccttctgaagcctctgcttcctgatactgaatacaaagtcacagtgactcccatctacacggatggcgaaggcgtcagcgtctccgctcctggaaaaaccttaccatcctcggggccccagaacttgcgggtgtccgaggaatggtataaccggttgcgcattacgtgggaccccccatcttccccggtgaaaggctatagaattgtctacaaacctgtcagtgttcctggtccaacactggaaacgtttgtgggagctgacattaacaccatccttatcacaaacctcctcagcggaatggactacaatgtgaagatatttgcctcccaggcctcaggcttcagcgacgccctgacaggcatggtgaaaacattgttcttgggtgttaccaatctccaagccaaacatgttgaaatgaccagcttgtgtgcccactggcaggtacatcgccatgccacagcctatagggttgttatagaatccctccaggataggcaaaagcaagaatccactgtgggtggagggacaaccaggcattgcttctatggacttcagcctgattctgaatataaaatcagtgtttatacaaagctccaggagattgaaggacctagtgtgagcataatggaaaaaacacaatcacttcctacacgaccaccaacttttcctccaaccattccaccagcaaaagaaggtaaaagaataatagaataattatctgattctaggtttaggatttgtgttggttttgtttgcctgttcatttcaaaccaggatattaataaagtatatttattgtgctaaaaaaaaaaaaaaaaa

SEQ ID NO: 285 - DNA, 2637 bp, Homo sapiens; identical to SEQ ID NO: 284

SEQ ID NO: 286 - DNA, 5876 bp, Homo sapiens
  misc_feature (269)..(269): n is a, c, g, or t
  misc_feature (427)..(427): n is a, c, g, or t
  misc_feature (626)..(633): n is a, c, g, or t
  misc_feature (635)..(636): n is a, c, g, or t
  misc_feature (638)..(640): n is a, c, g, or t
  misc_feature (642)..(643): n is a, c, g, or t
  misc_feature (646)..(648): n is a, c, g, or t
  misc_feature (2532)..(2532): n is a, c, g, or t
  misc_feature (3110)..(3114): n is a, c, g, or t
  misc_feature (3116)..(3123): n is a, c, g, or t
  misc_feature (3125)..(3126): n is a, c, g, or t
  misc_feature (3128)..(3130): n is a, c, g, or t
  misc_feature (3200)..(3200): n is a, c, g, or t
  misc_feature (5778)..(5779): n is a, c, g, or t
  misc_feature (5788)..(5797): n is a, c, g, or t
  misc_feature (5799)..(5806): n is a, c, g, or t
  misc_feature (5809)..(5812): n is a, c, g, or t
gctcacccaggaaaaatatgcaatcgtcccattgatatacaggccactacaatggatggagttaacctcagcaccgaggttgtctacaaaaaaggccaggattataggtttgcttgctacgaccggggcagagcctgccggagctaccgtgtacggttcctctgtgggaagcctgtgaggcccaaactcacagtcaccattgacaccaatgtgaacagcaccattctgaacttggaggataatgtacagtcatggaaacctggagatancctggtcattgccagtactgattactccatgtaccaggcagaagagttccaggtgcttccctgcagatcctgcgcccccaaccaggtcaaagtggcagggaaaccaatgtacctgcacatcggggaggagatagacggcgtggacatgcgggcggagnttgggcttctgagccggaacatcatagtgatgggggagatggaggacaaatgctacccctacagaaaccacatctgcaatttctttgacttcgatacctttgggggccacatcaagtttgctctgggatttaaggcagcacacttggagggcacggagctgaagcatatgggacagcagctggtgggtcagtacccgannnnnnnncnncnnncnngtnnngtagacgaaaggggaggttatgacccacccacatacatcagggacctctccatccatcatacattctctcgctgcgtcacagtccatggctccaatggcttgttgatcaaggacgttgtgggctataactctttgggccactgcttcttcacggaagatgggccggaggaacgcaacacttttgaccactgtcttggcctccttgtcaagtctggaaccctcctcccctcggaccgtgacagcaagatgtgcaagatgatcacagaggactcctacccagggtacatccccaagcccaggcaagactgcaatgctgtgtccaccttctggatggccaatcccaacaacaacctcatcaactgtgccgctgcaggatctgaggaaactggattttggtttatttttcaccacgtaccaacgggcccctccgtgggaatgtactccccaggttattcagagcacattccactgggaaaattctataacaaccgagcacattccaactaccgggctggcatgatcatagacaacggagtcaaaaccaccgaggcctctgccaaggacaagcggccgttcctctcaatcatctctgccagatacagccctcaccaggacgccgacccgctgaagccccgggagccggccatcatcagacacttcattgcctacaagaaccaggaccacggggcctggctgcgcggcggggatgtgtggctggacagctgccggtttgctgacaatggcattggcctgaccctggccagtggtggaaccttcccgtatgacgacggctccaagcaagagataaagaacagcttgtttgttggcgagagtggcaacgtggggacggaaatgatggacaataggatctggggccctggcggcttggaccatagcggaaggaccctccctataggccagaattttccaattagaggaattcagttatatgatggccccatcaacatccaaaactgcactttccgaaagtttgtggccctggagggccggcacaccagcgccctggccttccgcctgaataatgcctggcagagctgcccccataacaacgtgaccggcattgcctttgaggacgttccgattacttccagagtgttcttcggagagcctgggccctggttcaaccagctggacatggatggggataagacatctgtgttccatgacgtcgacggctccgtgtccgagtaccctggctcctacctcacgaagaatgacaactggctggtccggcacccagactgcatcaatgttcccgactggagaggggccatttgcagtgggtgctatgcacagatgtacattcaagcctacaagaccagtaacctgcgaatgaagatcatcaagaatgacttccccagccaccctctttacctggagggggcgctcaccaggagcacccattaccagcaataccaaccggttgtcaccctgcagaagggctacaccatccactgggaccagacggcccccgccgaactcgccatctggctcatcaacttcaacaagggcgactggatccgagtggggctctgctacccgcgaggcaccacattctccatcctctcggatgttcacaatcgcctgctgaagcaaacgtccaagacgggcgtcttcgtgaggaccttgcagatggacaaagtggagcagagctaccctggcaggagccactactactgggacgaggactcagggctgttgttcctgaagctgaaagctcagaacgagagagagaagtttgctttctgctccatgaaaggctgtgagaggataaagattaaagctctgattccaaagaacgcaggcgtcagtgactgcacagccacagcttaccccaagttcaccgagagggctgtcgtagangtgccgatgcccaagaagctctttggttctcagctgaaaacaaaggaccatttcttggaggtgaagatggagagttccaagcagcacttcttccacctctggaacgacttcgcttacattgaagtggatgggaagaagtaccccagttcggaggatggcatccaggtggtggtgattgacgggaaccaagggcgcgtggtgagccacacgagcttcaggaactccattctgcaaggcataccatggcagcttttcaactatgtggcgaccatccctgacaattccatagtgcttatggcatcaaagggaagatacgtctccagaggcccatggaccagagtgctggaaaagcttggggcagacaggggtctcaagttgaaagagcaaatggcattcgttggcttcaaaggcagcttccggcccatctgggtgacactggacactgaggatcacaaagccaaaatcttccaagttgtgcccatccctgtggtgaagaagaagaagttgtgaggacagctgccgcccggtgccacctcgtggtagactatgacggtgactcttggcagcagaccagtggnnnnngnnnnnnnncnncnnnccctgccagcagctgcctgggaaggccgtgtttcagccctgatgggccaagggaaggctatcagagaccntggtgctgccacctgcccctactcaagtgtctacctggagcccctggggcggtgctggccaatgctggaaacattcactttcctgcagcctcttgggtgcttctctcctatctgtgcctcttcagtgggggtttggggaccatatcaggagacctgggttgtgctgacagcaaagatccactttggcaggagccctgacccagctaggaggtagtctggagggctggtcattcacagatccccatggtcttcagcagacaagtgagggtggtaaatgtaggagaaagagccttggccttaaggaaatctttactcctgtaagcaagagccaacctcacaggattaggagctggggtagaactggctatccttggggaagaggcaagccctgcctctggccgtgtccacctttcaggagactttgagtggcaggtttggacttggactagatgactctcaaaggcccttttagttctgagattccagaaatctgctgcatttcacatggtacctggaacccaacagttcatggatatccactgatatccatgatgctgggtgccccagcgcacacgggatggagaggtgagaactaatgcctagcttgaggggtctgcagtccagtagggcaggcagtcaggtccatgtgcactgcaatgccaggtggagaaatcacagagaggtaaaatggaggccagtgccatttcagaggggaggctcaggaaggcttcttgcttacaggaatgaaggctgggggcattttgctggggggagatgaggcagcctctggaatggctcagggattcagccctccctgccgctgcctgctgaagctggtgactacggggtcgccctttgctcacgtctctctggcccactcatgatggagaagtgtggtcagaggggagcaatgggctttgctgcttatgagcacagaggaattcagtccccaggcagccctgcctctgactccaagagggtgaagtccacagaagtgagctcctgccttagggcctcatttgctcttcatccagggaactgagcacagggggcctccaggagaccctagatgtgctcgtactccctcggcctgggatttcagagctggaaatatagaaaatatctagcccaaagccttcattttaacagatggggaaagtgagcccccaagatgggaaagaaccacacagctaagggagggcctggggagccccaccctagcccttgctgccacaccacattgcctcaacaaccggccccagagtgcccaggcactcctgaggtagcttctggaaatggggacaagtcccctcgaaggaaaggaaatgactagagtagaatgacagctagcagatctcttccctcctgctcccagcgcacacaaacccgccctccccttggtgttggcggtccctgtggccttcactttgttcactacctgtcagcccagcctgggtgcacagtagctgcaactccccattggtgctacctggctctcctgtctctgcagctctacaggtgaggcccagcagagggagtagggctcgccatgtttctggtgagccaatttggctgatcttgggtgtctgaacagctattgggtccaccccagtccctttcagctgctgcttaatgccctgctctctccctggcccaccttatagagagcccaaagagctcctgtaagagggagaactctatctgtggtttataatcttgcacgaggcaccagagtctccctgggtcttgtgatgaactacatttatcccctttcctgccccaaccacaaactctttccttcaaagagggcctgcctggctccctccacccaactgcacccatgagactcggtccaagagtccattccccaggtgggagccaactgtcagggaggtctttcccaccaaacatctttcagctgctgggaggtgaccatagggctctgcttttaaagatatggctgcttcaaaggccagagtcacaggaaggacttcttccagggagattagtggtgatggagaggagagttaaaatgacctcatgtccttcttgtccacggttttgttgagttttcactcttctaatgcaagggtctcacactgtgaaccacttaggatgtgatcactttcaggtggccaggaatgttgaatgtctttggctcagttcatttaaaaaagatatctatttgaaagttctcagagttgtacatatgtttcacagtacaggatctgtacataaaagtttctttcctaaaccattcaccaagagccaatatctaggcattttcttggtagcacaaattttcttattgcttagaaaattgtcctccttgttatttctgtttgtaagacttaagtgagttaggtctttaaggaaagcaacgctcctctgaaatgcttgtcttttttctgttgccgaaatagctggtcctttttcgggagttagatgtatagagtgtttgtatgtaaacatttcttgtaggcatcaccatgaacaaagatatattttctatttatttattatatgtgcacttcaagaagtcactgtcagagaaataaagaattgtcttaaatgtcannaaaaaaaannnnnnnnnnannnnnnnnaannnntgtacctagagccaaggaaattggctctggtttggaaaaattttgctgttattatagtaaacat

SEQ ID NO: 287 - DNA, 6379 bp, Homo sapiens
ggaaaacaaaagagctcagcggcagttttgtgttgctgtgtctggcttaaagaggaaaattctagacatccatgttgaaaaatcaaagctcagctgagactacttctatcaagaaaattatttttatctgcgaatgggttggatcagtacaggtggtttgagaagacactgactgaggaccatggaaaggtgggagaggacgtgcggcttctctgcttcctttgaacagagctctaggcaccacaaggccacataaggagggtgaggtccctggagtggattatattttcatcactgttgaagattttatggaattggagaaaagtggtgctctcctagaaagtgggacttatgaagacaattactacggtaccccaaagccgccagcagaaccagcaccattattgttaaatgtaacagaccagatacttccaggagccactccaagtgctgaaggaaaacggaagaggaataaatcagtgagcaacatggagaaagccagtatagagcctcctgaggaggaagaggaagagaggcctgtggtcaatggaaatggagtagtagtaacaccagaatccagtgaacatgaagacaaaagtgcaggtgcctcaggggagatgccctcccagccttatcctgcaccagtgtacagtcagcctgaggagctgaaggagcagatggatgacacaaagccaactaaacctgaagacaatgaggaaccagacccattgcctgataactgggaaatggcctatacagagaagggcgaagtctacttcattgaccataacacaaagacaacatcatggctggatccacgacttgcgaaaaaagctaaacctccagaagagtgcaaagaaaatgagcttccatatggctgggaaaaaatcgatgatcccatttatggcacttattatgttgaccacataaatagaagaacacagtttgaaaatcctgtcctggaagcaaaaaggaagctacagcaacataacatgccccacacagaacttggaacaaagcccctgcaggccccaggtttccgagaaaaaccactcttcacccgggatgcatcccagttgaagggaacattcctcagcaccaccctaaaaaagagcaacatgggctttggatttaccatcattggtggagacgagcctgatgagtttctgcaggtgaaaagtgtgattccggatgggcctgcagcacaggatggaaaaatggaaacaggtgatgtcattgtctatattaatgaagtttgtgtccttggacacactcatgcagatgttgtcaaacttttccagtctgttcctattggtcagagtgtcaacctggtgttgtgtcgtggctaccctttgccctttgatcctgaagaccctgctaacagcatggtgccaccccttgcaataatggagaggccacctccagtgatggtcaatggaagacacaactatgaaacatatttggagtacatttctcggacctcacagtcagttccagatataacagatcggccgcctcattctctgcactccatgccaactgatggtcagctagacggcacgtatccaccgcccgtccatgatgacaatgtgtctatggcttcatctggggccacccaagctgaacttatgaccttaaccattgtgaaaggtgcccagggcttcggcttcactattgccgacagtcctacaggacagcgggtgaaacaaatacttgacattcagggatgccctggcctgtgtgaaggcgacctcattgttgagatcaaccagcagaatgtacagaacctgagccatacagaagtagtggatatacttaaggactgtcccattggaagtgaaacttctttgattatccatcgaggaggtttcttttctccatggaaaactccaaagcctataatggaccgatgggagaatcaaggcagtcctcaaacgagtttatctgctccggccataccgcagaacctgcccttcccacctgcccttcacaggagctcctttcctgactcaacagaggcctttgacccacggaagcctgatccatatgagctctacgagaaatctagggccatttatgaaagtaggcgtccagattataaggaattggatgttcatcttcggaggatggagtctggatttggcttcagaatcctcgggggagatgagcctggacagcctattttgattggagctgtcattgccatgggctcagccgacagagatggccgccttcacccaggagatgagcttgtgtatgttgatgggattccagtagccggcaaaacccaccgctatgtcatcgacctcatgcaccacgcagcccgcaatgggcaggtcaacctcactgtgagaagaaaggtgctatgtggaggggagccctgcccagagaacgggagaagtccaggctctgtatccacccaccacagctctccacgcagtgactacgcaacctacaccaacagcaaccacgctgcccccagtagcaatgcctctccccctgaaggcttcgcctcccacagcctgcagaccagtgatgtggtcattcaccgcaaagagaatgagggcttcggctttgtcatcatcagctccctgaacaggcctgagtctggatccactataactgtgccccataaaatcggacgcatcattgatgggagtcctgcagatcgctgtgcaaaactaaaagtgggagaccggatcctagcagtgaatggccagtctatcatcaacatgcctcacgctgacatcgtgaagctcatcaaggatgcaggtcttagtgtcacccttcgcatcattcctcaggaggagctcaacagccccacctcggcacccagctcagagaagcagagtcccatggcgcagcagagtcccctggcacagcagagtcccctggcccagccaagcccagccacccccaacagccccatcgcccagccagcaccacctcaaccacttcagctgcaaggacacgaaaatagttacaggtcagaagtgaaagcaaggcaagatgtgaaaccagacatccgacagcctccattcacagactacaggcagcccccgctggattacaggcaacccccaggaggggactaccagcagcccccacccttggactacaggcagcctcccctgctggactacaggcagcactcccccgacaccaggcagtaccctctgtcggactacagacaaccccaggattttgattatttcactgtggacatggagaaaggagccaaaggatttggattcagcattcgtggaggaagggaatacaaaatggatttgtatgtgttgagactggcagaagatggaccagcaataaggaatgggaggatgagggtaggagatcaaatcattgaaatcaatggggaaagcacaagggacatgacacatgccagagcaatagaactcatcaaatctggaggaagacgagtgaggctgctgctcaagagaggcacgggacaggtcccagaatatgacgaacccgccccctggagttctcccgctgccgccgccccaggtctgccggaagtaggcgtctccctggacgacggcctcgctccattctctccatcacatccagccccaccctccgacccttcccaccagataagcccaggcccaacttgggatatcaaacgggaacacgacgttaggaaaccaaaggagctttcagcctgcggccagaagaagcagcgcctcggggagcagagggagcgctcggcgagtccgcagagggccgcgcggccgaggctcgaggaggcgcccggcggccaggggcggcccgaggccggcaggcccgcctcggaggccagggcgcccgggctcgcggcggcagacgcggcggacgcggcgcgggcgggcgggaaggaggcgccccgtgcggcggcgggctccgagctctgccggcgcgaaggcccgggggctgcgccggcgtttgccggcccgggcggcggcggcagcggcgcgctggaggccgagggcagggcgggtgcgcgcgcgggtccccggccgggcccgcgacccccggggggcgccccggcgcgcaaggccgccgtcgcgccggggccctggaaggtgccgggttctgacaagctgcccagcgtcctcaaacccggcgcctcggccgccagcagatgagccgcgcggccacggccaacccgcccgccccggcgcaggcagttcttcttaggttccgtctcacggcgttttaatttattttcactgtcacacgcatagatccacgaggcaccaaggcctgggagcatcgacgtgaagtcccacgtgtccggtgtgcttgggcggcatcgcatcaacgcgcagacctaaactgatcctaaagcccccggttcccttgtgggggctttggcagctatggaagaaccaaaataacgtgaagaacatcacagagagacagtgcagtgtagctttagtttaagaaaaaaaaatattcctccccactgcatgaaggacttggatgtcatccaaactttatatcaagaaacaggacaaagttaagagcaatcacaaactggaatatcgccttaaaaatcaaactgcacggagcaagctgaaactgagacaagattatatcttttaattgatctaaagcgttgtaaataaattgttctcgacatatctagacaggggttaaagggtttctttgacacattcggaaccgttcacccatgacatgtttccatggctcacccttggcatccatcctcggtgttagcagcagcgttccctgcctcctgcaggatgacttagaaatctagtgagtttcttggtgtgatgccatttttattgccctttctgtgatcaaatcatatttctgtacattttcagtggtagaaaaaaaaggttttaaaaattgtatcctagggaacagtttgccataagtcagaattttgcagtttagctcatagatcttaattggtttttctctaaaatatgaattttataattgaaggaccacaatttgtttaatcaagataggcaacgctgcagttcctttatgaagaggcttttctgtcgtcccaggctagcagagatggatagcttctttgtcagcaatgtgatttcacttattttattgtcttattttaaaccctgtctccatgacttcatttgcactttgacagagcagaggcagagtatttgtcttatatttctcagattataatattaaaaaattacaatcaatttattttcattaaagaacgtgagtctttttagcattcctttctgcttatccttctttccttaccctttgtccttttgtttccattagttttctttcgtcttgtattccttgccactttattttgttagcaacttctagatgtttatcttcatggatctatgattgacctcctagtaaaattctaagtcttgcctttcttccctgctgttttagcatttctttgtaaaatgttagcttcaattagttagccattggtacttactgtagctacacatattaaaaggcaaagtgtttctgaaggcaatttctttttaatatgcccgaatgaatgaggcttcatcctttccatattcttactctttacagtagttcaaatgcaaataagctccacctccctgcacttgtagtctaaaaagtaaaaggggcgatcaggtccatctcaaaggtcacacgtaatagcctccctgggctgatcattccctctccttgtaattgcagtatcctgagtagcagtttaattttcatcaaacatcggagtagtttagttgtttgacaggaggagaataaggctgaaagcctcaagtgaaggatcttgcagcttgtaaaagcaatttccaaaaatgaaacccattcatcgtaaacaaaagcacaaacacttgtagcagtttataatgcttttggtttaatctcaattagtctttctcccctggactagaaatccagtatagtttgccattaatttattgaatctggttttggacaatgcttctgtagtgtagctgcacgtcctggtactgtatcctctgactttattttccatgtattacaaaaggaaaaaaaaattgagattacactggcataaactctagtttgcacagttcacagctactacttgtgcagtaattgctttatgcggctgtaatccataacctgtgaagacagcacatcatctaaatcccattccaaataatatttgtgtagtgttagctgtgaatttaccctgtacagctgtatctctataaatataattccatgtattaatagtcacagaaagactgtaagtgagcaactatttttatgaaacgtaccactatggataaattaacttttacagaaatcttgtttactgtatgatattctaaaacactgtcaaataaaatatatatcc

SEQ ID NO: 288 - DNA, 1624 bp, Homo sapiens
gttttcaggggacaggccaacccagaggacaggattccctggaggccacagaggagcaccaaggagaagatctgcctgtgggtcttcattgcccagctcctgcccacactcctgcctgctgccctgacgagagtcatcatgtctcttgagcagaggagtctgcactgcaagcctgaggaagcccttgaggcccaacaagaggccctgggcctggtgtgtgtgcaggctgccacctcctcctcctctcctctggtcctgggcaccctggaggaggtgcccactgctgggtcaacagatcctccccagagtcctcagggagcctccgcctttcccactaccatcaacttcactcgacagaggcaacccagtgagggttccagcagccgtgaagaggaggggccaagcacctcttgtatcctggagtccttgttccgagcagtaatcactaagaaggtggctgatttggttggttttctgctcctcaaatatcgagccagggagccagtcacaaaggcagaaatgctggagagtgtcatcaaaaattacaagcactgttttcctgagatcttcggcaaagcctctgagtccttgcagctggtctttggcattgacgtgaaggaagcagaccccaccggccactcctatgtccttgtcacctgcctaggtctctcctatgatggcctgctgggtgataatcagatcatgcccaagacaggcttcctgataattgtcctggtcatgattgcaatggagggcggccatgctcctgaggaggaaatctgggaggagctgagtgtgatggaggtgtatgatgggagggagcacagtgcctatggggagcccaggaagctgctcacccaagatttggtgcaggaaaagtacctggagtaccggcaggtgccggacagtgatcccgcacgctatgagttcctgtggggtccaagggccctcgctgaaaccagctatgtgaaagtccttgagtatgtgatcaaggtcagtgcaagagttcgctttttcttcccatccctgcgtgaagcagctttgagagaggaggaagagggagtctgagcatgagttgcagccaaggccagtgggagggggactgggccagtgcaccttccagggccgcgtccagcagcttcccctgcctcgtgtgacatgaggcccattcttcactctgaagagagcggtcagtgttctcagtagtaggtttctgttctattgggtgacttggagatttatctttgttctcttttggaattgttcaaatgtttttttttaagggatggttgaatgaacttcagcatccaagtttatgaatgacagcagtcacacagttctgtgtatatagtttaagggtaagagtcttgtgttttattcagattgggaaatccattctattttgtgaattgggataataacagcagtggaataagtacttagaaatgtgaaaaatgagcagtaaaatagatgagataaagaactaaagaaattaagagatagtcaattcttgccttatacctcagtctattctgtaaaatttttaaagatatatgcatacctggatttccttggcttctttgagaatgtaagagaaattaaatctgaataaagaattcttcct

SEQ ID NO: 289 - DNA, 3659 bp, Homo sapiens
  misc_feature (76)..(119): n is a, c, g, or t
  misc_feature (260)..(260): n is a, c, g, or t
  misc_feature (2043)..(2043): n is a, c, g, or t
  misc_feature (2061)..(2061): n is a, c, g, or t
  misc_feature (2179)..(2179): n is a, c, g, or t
  misc_feature (2995)..(2995): n is a, c, g, or t
  misc_feature (3002)..(3002): n is a, c, g, or t
  misc_feature (3005)..(3005): n is a, c, g, or t
  misc_feature (3008)..(3008): n is a, c, g, or t
  misc_feature (3013)..(3014): n is a, c, g, or t
  misc_feature (3031)..(3031): n is a, c, g, or t
  misc_feature (3038)..(3038): n is a, c, g, or t
  misc_feature (3045)..(3045): n is a, c, g, or t
  misc_feature (3053)..(3053): n is a, c, g, or t
  misc_feature (3065)..(3065): n is a, c, g, or t
  misc_feature (3130)..(3130): n is a, c, g, or t
  misc_feature (3309)..(3312): n is a, c, g, or t
  misc_feature (3314)..(3319): n is a, c, g, or t
  misc_feature (3322)..(3325): n is a, c, g, or t
  misc_feature (3327)..(3330): n is a, c, g, or t
  misc_feature (3332)..(3333): n is a, c, g, or t
  misc_feature (3339)..(3339): n is a, c, g, or t
  misc_feature (3382)..(3382): n is a, c, g, or t
gaatttgtcatctactctgtattatctgagagtgggcacattcaaaaacaaaatcatcacatctctgattcacatnnnnnnnnnnnnnnnnnnnnnnnnnnnnnnnnnnnnnnnnnnnnttaacaggccatgaaaagattgttttattccatgtaaatattctcaacagagaacactatctttaaatgaaggatttaccattaagaaatcaacatgtgcacaaaaagagtaaaaattaccaaaaaattaaagattttttngggacaattcacatgttcaaaatttaagaatgatttaaactgtgcaagtacaaatgtctttcctattataataacccatatacaggttgcactattccacatcaaggaacttgcctcctacggaagcaaatcctgcttttagaaaaacaaacagtagcttgaaaagaacagttagtccttacaagaaagtcttaaactttgccctctgtggctgttagccaaaaaaccataagcacttcaggctttgtacagaagacaaacacagccagatcacatttcctcctcattgctaacctttaaaataaaaatagcactagattttaaaactacttcatgtagtctgtcagtactgaataatgtcacattatataaataaccctgtaacgagattcaatatctaaactttatagtttactagctgcaaaggtaatacactatatgtcagctgtgtaacagtggtgacttgatcttatgaaggcagtaactttcacacaattgtcattcagctttagtataacgggtagtatgattcaaataacactgggaaaaagttattaaagcagtcacacagcttctaaaatattgcttaaaattcaataatacacaaaccatttcacgttctttctcccctcaaaacagtaaagaaccaaattaatgaagattcagtggtacaaataaccccccacctgccccatctccctattacaacaccactaagaaattagttaagatacatgtcattaacagaatcacaaatgcgaggcaggacaccatgagcaacaggagcactaacaacaatcatatttacaagtataaacatacagaaattccattttacaagtaaaagtgcacatagatcattacaaagtttcactaaattttatcaggttcaaacaaaagcatcacgtggaaagagactatcattgtaattatcaaacatgatcgtcataacccaaaataaaaagacaattgggggaggcccataaaacttctcataaaaccactgaggaaattaaaatggacttggacatgtctttagtttgatgcataaatttgaagatgcaccactgtatatggtagagctctaatagccacctaccgaggctacatcggcagctgcagcggtgctgcagagttaaagcaggtcgcactgagctgacacataaagccctttgtgggatactgtagtggtagtgttggcaatcaacagatttaggcactcaagtttaaggcagcatttgaatggaagcagctgacttttgacaatagtcctttgtcttgaggtggtgaatatcttctgtgtttattatgccaggatttcagtgctgactagattcttcccagactgaggtgctgaagatgtatcacgtttcaaagagttctttcaactgggctgtaggctacagcagagatgttttctttttcttatcataaatacttcaggttcacagctacttcttcgtaatgctaaaactggaatgtttgcagtggggaagttatagcagtgtgcacaaatactaagatggaaacattagtgctggagatgtttgacaaagtgatttgcactacaaatgtaaaacaaaacaaggctttgacaagaacaagggaatctaaagacatgcctgaaaaatctagctcaatcacgctagacatgcaacaggatgttaagcaagcacggaggtggcgcaggcagacactgacagatggcaaggatctgacagatagtgggtctaaaagccaattaaaacagagctgggagggaagacaatcctgttgggacagntaatgtaagacacatttntttgacagctctgcattctttattgattagacagcaataaaataaatagaaaaatggtacactattgttggctttttcttttgtgggaataactgtgaactaggaacttaagggttgntattatgatttttaaaaacaatgtatggaaatgctaatgaagttagtaaaaaaaaaatcatgtctgcatgcactcatgcaacttgcttctctcactctctttgagcctgacaactctaataccctcccccaaaagcagctgcatgtaacctccttcaacatcttgcccatttcctcagaaaccctcttcaggaacctgcagtccaggaggaaaaagaaaagaacaattactgaagacctttggtaaaaccaaaaggggtgttcagtttaaagtgcctgtcccaaatgtctctatcattttatagtcagctaccgaaaacaccaggaaaatttaaaacatgggcaaaattaaaaaccaatcttactgcttcttcacactttacttccccacaccactgactcagggtgtggtcacacaaccagcactgcacaatccttgactgcacagtgtttccaacaacgcttgctgaaactaattggaaaaatttatctatcctaataactaatgattcagcggaaataacaaaatgccctaaaggcggtacacatatcttcctctaacccagatagtcaaaaagtttctcctttaaaaattaaaatttgtcaacacttcccctccattcaaggtttcctctatcttcaaatgtgtatttttctatgtaactgtgtattttcctatgtgtaactgctaaatgctaaataatcactaaagtggtatttcccaaaagatattttcaagatgaaacatacaaaagtatgagattagtttggaaggaagcttgtaaattattgaaaattaccagctaacctcaaaatnattttgnggntcncaaannaaaatctattttattcnacctaangagctangaccaggnagatttattttngaaactctctttaaatctacttaaatagattatgtgctacctgctcattttcttcctttaggaanccaaagttaagaataggtaagaaaatgaaaatgatgttattattttactaaattatccaactactatttttcttcttggaaactgtagctacaaattcaaacttctagaagaaaccactctttggggagtcggctttccatagcatttcagagcagtttcactattcaaattcactaannnnannnnnnttnnnnannnnannggggcngagagcattactatccatgaattcctgcccaataaatcaaatnctatttgtaaggcagaaaaacacaaatccttcacacagacttaagcgggacataaagcaaaaggcatcaattaagcttcacaccaacgttactcaaacagtaaagtgccacaaaatgtttcttgtggtaatattcacaagatcaagcctacactcagctcacatagtgaacaattaatcttggatgccctttaagtttccttatttttttcaacctgttgaatgtgttttcattttatgttactcttcctatgtcacacatggcgcaaaggtgcctg

SEQ ID NO: 290 - DNA, 5503 bp, Homo sapiens
agccgccgccggggctgtaggcgccaaggccatgtccgactcgtgggtcccgaactccgcctcgggccaggacccagggggccgccggagggcctgggccgagctgctggcgggaagggtcaagagggaaaaatataatcctgaaagggcacagaaattaaaggaatcagctgtgcgcctcctgcgaagccatcaggacctgaatgcccttttgcttgaggtagaaggtccactgtgtaaaaaattgtctctcagcaaagtgattgactgtgacagttctgaggcctatgctaatcattctagttcatttataggctctgctttgcaggatcaagcctcaaggctgggggttcccgtgggtattctctcagccgggatggttgcctctagcgtgggacagatctgcacggctccagcggagaccagtcaccctgtgctgctgactgtggagcagagaaagaagctgtcttccctgttagagtttgctcagtatttattggcacacagtatgttctcccgtctttccttctgtcaagaattatggaaaatacagagttctttgttgcttgaagcggtgtggcatcttcacgtacaaggcattgtgagcctgcaagagctgctggaaagccatcccgacatgcatgctgtgggatcgtggctcttcaggaatctgtgctgcctttgtgaacagatggaagcatcctgccagcatgctgacgtcgccagggccatgctttctgattttgttcaaatgtttgttttgaggggatttcagaaaaactcagatctgagaagaactgtggagcctgaaaaaatgccgcaggtcacggttgatgtactgcagagaatgctgatttttgcacttgacgctttggctgctggagtacaggaggagtcctccactcacaagatcgtgaggtgctggttcggagtgttcagtggacacacgcttggcagtgtaatttccacagatcctctgaagaggttcttcagtcataccctgactcagatactcactcacagccctgtgctgaaagcatctgatgctgttcagatgcagagagagtggagctttgcgcggacacaccctctgctcacctcactgtaccgcaggctctttgtgatgctgagtgcagaggagttggttggccatttgcaagaagttctggaaacgcaggaggttcactggcagagagtgctctcctttgtgtctgccctggttgtctgctttccagaagcgcagcagctgcttgaagactgggtggcgcgtttgatggcccaggcattcgagagctgccagctggacagcatggtcactgcgttcctggttgtgcgccaggcagcactggagggcccctctgcgttcctgtcatatgcagactggttcaaggcctcctttgggagcacacgaggctaccatggctgcagcaagaaggccctggtcttcctgtttacgttcttgtcagaactcgtgccttttgagtctccccggtacctgcaggtgcacattctccacccacccctggttcccagcaagtaccgctccctcctcacagactacatctcattggccaagacacggctggccgacctcaaggtttctatagaaaacatgggactctacgaggatttgtcatcagctggggacattactgagccccacagccaagctcttcaggatgttgaaaaggccatcatggtgtttgagcatacggggaacatcccagtcaccgtcatggaggccagcatattcaggaggccttactacgtgtcccacttcctccccgccctgctcacacctcgagtgctccccaaagtccctgactcccgtgtggcgtttatagagtctctgaagagagcagataaaatccccccatctctgtactccacctactgccaggcctgctctgctgctgaagagaagccagaagatgcagccctgggagtgagggcagaacccaactctgctgaggagcccctgggacagctcacagctgcactgggagagctgagagcctccatgacagaccccagccagcgtgatgttatatcggcacaggtggcagtgatttctgaaagactgagggctgtcctgggccacaatgaggatgacagcagcgttgagatatcaaagattcagctcagcatcaacacgccgagactggagccacgggaacacattgctgtggacctcctgctgacgtctttctgtcagaacctgatggctgcctccagtgtcgctcccccggagaggcagggtccctgggctgccctcttcgtgaggaccatgtgtggacgtgtgctccctgcagtgctcacccggctctgccagctgctccgtcaccagggcccgagcctgagtgccccacatgtgctggggttggctgccctggccgtgcacctgggtgagtccaggtctgcgctcccagaggtggatgtgggtcctcctgcacctggtgctggccttcctgtccctgcgctctttgacagcctcctgacctgtaggacgagggattccttgttcttctgcctgaaattttgtacagcagcaatttcttactctctctgcaagttttcttcccagtcacgagatactttgtgcagctgcttatctccaggccttattaaaaagtttcagttcctcatgttcagattgttctcagaggcccgacagcctctttctgaggaggacgtagccagcctttcctggagacccttgcaccttccttctgcagactggcagagagctgccctctctctctggacacacagaaccttccgagaggtgttgaaagaggaagatgttcacttaacttaccaagactggttacacctggagctggaaattcaacctgaagctgatgctctttcagatactgaacggcaggacttccaccagtgggcgatccatgagcactttctccctgagtcctcggcttcagggggctgtgacggagacctgcaggctgcgtgtaccattcttgtcaacgcactgatggatttccaccaaagctcaaggagttatgaccactcagaaaattctgatttggtctttggtggccgcacaggaaatgaggatattatttccagattgcaggagatggtagctgacctggagctgcagcaagacctcatagtgcctctcggccacaccccttcccaggagcacttcctctttgagattttccgcagacggctccaggctctgacaagcgggtggagcgtggctgccagccttcagagacagagggagctgctaatgtacaaacggatcctcctccgcctgccttcgtctgtcctctgcggcagcagcttccaggcagaacagcccatcactgccagatgcgagcagttcttccacttggtcaactctgagatgagaaacttctgctcccacggaggtgccctgacacaggacatcactgcccacttcttcaggggcctcctgaacgcctgtctgcggagcagagacccctccctgatggtcgacttcatactggccaagtgccagacgaaatgccccttaattttgacctctgctctggtgtggtggccgagcctggagcctgtgctgctctgccggtggaggagacactgccagagcccgctgccccgggaactgcagaagctacaagaaggccggcagtttgccagcgatttcctctcccctgaggctgcctccccagcacccaacccggactggctctcagctgctgcactgcactttgcgattcaacaagtcagggaagaaaacatcaggaagcagctaaagaagctggactgcgagagagaggagctattggttttccttttcttcttctccttgatgggcctgctgtcgtcacatctgacctcaaatagcaccacagacctgccaaaggctttccacgtttgtgcagcaatcctcgagtgtttagagaagaggaagatatcctggctggcactctttcagttgacagagagtgacctcaggctggggcggctcctcctccgtgtggccccggatcagcacaccaggctgctgcctttcgctttttacagtcttctctcctacttccatgaagacgcggccatcagggaagaggccttcctgcatgttgctgtggacatgtacttgaagctggtccagctcttcgtggctggggatacaagcacagtttcacctccagctggcaggagcctggagctcaagggtcagggcaaccccgtggaactgataacaaaagctcgtctttttctgctgcagttaatacctcggtgcccgaaaaagagcttctcacacgtggcagagctgctggctgatcgtggggactgcgacccagaggtgagcgccgccctccagagcagacagcaggctgcccctgacgctgacctgtcccaggagcctcatctcttctgacgggacctgccactgcacaccagcccagctcccgtgtaaataatttattacaagcataacatggagctcttgttgcactaaaaagtggattacaaatctcctcgactgctttagtggggaaaggaatcaattatttatgaactgtccggccccgagtcactcagcgtttgcgggaaaataaaccactggtcccagagcagaggaaggctacttgagccggacaccaagcccgcctccagcaccaagggcgggcagcaccctccgaccctcccatgcgggtgcacacgaagggtgaggctgacacagccactgcggagtccaggctgctagaggtgctcatcctcactgccgtcctcaggtgggttcgggcttcaccgcctggccctctgtggtcacagaggggctcggtggcccaggtggtggttccgcctccaggggcagggccttgtcctgggtctgtgtcagcgggtgcaccatggacatgtgtacattgaggttgtgggccttctcaaaccgccggccacactggtcacaggcaaagtccagctcagtctcagccttgtgtttggtcatgtggtacttgagggatgcccgctgcctgcactggaacccacagacctcacacctgggggacagaggcagataagaaggtgcgaggccacagccctgggagggggtcctgactcacacttactgcaaaggcttggctcccgaatgtcgcatttggtggacgagaaggtgcttccgctgcttgaaggtttgtccacattcgtcacagatatagttccgcacctctgagaggggagagtccagtgagtccaggcccctgatgctccaacctcccggggggacgacgatgacaatgtgaaaccatcacagctgggaagacatttctgcacatggttcaccatgcagtgggcccaagcaaggggcctatgagggcctcgtttattaagatctttaaactgctttatacactgtcacgtggcttcatcagctgtgtgcatttcaggatggtttttaaagaaacctcagaaagctatttccttaaaaaaaaaaaaaaaaaaaaaaaaaaaaaaaaaaaaaaaaaaaaaaaaaaaaaaa

SEQ ID NO: 291 - DNA, 3448 bp, Homo sapiens
gactgggtcatccctccaatcaacttgccagaaaactccaggggaccttttcctcaagagcttgtcaggatcaggtctgatagagataaaaacctttcactgcggtacagtgtaactgggccaggagctgaccagcctccaactggtatcttcattctcaaccccatctcgggtcagctgtcggtgacaaagcccctggatcgcgagcagatagcccggtttcatttgagggcacatgcagtagatattaatggaaatcaagtggagaaccccattgacattgtcatcaatgttattgacatgaatgacaacagacctgagttcttacaccaggtttggaatgggacagttcctgagggatcaaagcctggaacatatgtgatgaccgtaacagcaattgatgctgacgatcccaatgccctcaatgggatgttgaggtacagaatcgtgtctcaggctccaagcaccccttcacccaacatgtttacaatcaacaatgagactggtgacatcatcacagtggcagctggacttgatcgagaaaaagtgcaacagtatacgttaataattcaagctacagacatggaaggcaatcccacatatggcctttcaaacacagccacggccgtcatcacagtgacagatgtcaatgacaatcctccagagtttactgccatgacgttttatggtgaagttcctgagaacagggtagacatcatagtagctaatctaactgtgaccgataaggatcaaccccatacaccagcctggaacgcagtgtacagaatcagtggcggagatcctactggacggttcgccatccagaccgacccaaacagcaacgacgggttagtcaccgtggtcaaaccaatcgactttgaaacaaataggatgtttgtccttactgttgctgcagaaaatcaagtgccattagccaagggaattcagcacccgcctcagtcaactgcaaccgtgtctgttacagttattgacgtaaatgaaaacccttattttgcccccaatcctaagatcattcgccaagaagaagggcttcatgccggtaccatgttgacaacattcactgctcaggacccagatcgatatatgcagcaaaatattagatacactaaattatctgatcctgccaattggctaaaaatagatcctgtgaatggacaaataactacaattgctgttttggaccgagaatcaccaaatgtgaaaaacaatatatataatgctactttccttgcttctgacaatggaattcctcctatgagtggaacaggaacgctgcagatctatttacttgatattaatgacaatgcccctcaagtgttacctcaagaggcagagacttgcgaaactccagaccccaattcaattaatattacagcacttgattatgacattgatccaaatgctggaccatttgcttttgatcttcctttatctccagtgactattaagagaaattggaccatcactcggcttaatggtgattttgctcagcttaatttaaagataaaatttcttgaagctggtatctatgaagttcccatcataatcacagattcgggtaatcctcccaaatcaaatatttccatcctgcgcgtgaaggtttgccagtgtgactccaacggggactgcacagatgtggacaggattgtgggtgcggggcttggcaccggtgccatcattgccatcctgctctgcatcatcatcctgcttatccttgtgctgatgtttgtggtatggatgaaacgccgggataaagaacgccaggccaaacaacttttaattgatccagaagatgatgtaagagataatattttaaaatatgatgaagaaggtggaggagaagaagaccaggactatgacttgagccagctgcagcagcctgacactgtggagcctgatgccatcaagcctgtgggaatccgacgaatggatgaaagacccatccacgccgagccccagtatccggtccgatctgcagccccacaccctggagacattggggacttcattaatgagggccttaaagcggctgacaatgaccccacagctccaccatatgactccctgttagtgtttgactatgaaggcagtggctccactgctgggtccttgagctcccttaattcctcaagtagtggtggtgagcaggactatgattacctgaacgactgggggccacggttcaagaaacttgctgacatgtatggtggaggtgatgactgaacttcagggtgaacttggtttttggacaagtacaaacaatttcaactgatattcccaaaaagcattcagaagctaggctttaactttgtagtctactagcacagtgcctgctggaggctttggcataggctgcaaaccaatttgggctcagagggaatatcagtgatccatactgtttggaaaaacactgagctcagttacacttgaattttacagtacagaagcactgggattttatgtgcctttttgtacctttttcagattggaattagttttctgtttaaggctttaatggtactgatttctgaaacgataagtaaaagacaaaatattttgtggtgggagcagtaagttaaaccatgatatgcttcaacacgcttttgttacattgcatttgcttttattaaaatacaaaattaaacaaacaaaaaaactcatggagcgattttattatcttgggggatgagaccatgagattggaaaatgtacattacttctagttttagactttagtttgttttttttttttttcactaaaatcttaaaacttactcagctggttgcaaataaagggagttttcatatcaccaatttgtagcaaaattgaattttttcataaactagaatgttagacacattttggtcttaatccatgtacacctttttatttctgtatttttccacttcactgtaaaaatagtatgtgtacataatgttttattggcatacgtctatggagaagtgcagaaacttcagaacatgtgtatgtattatttggactatggattcaggttttttgcatgtttatatctttcgttatggataaagtatttacaaaacagtgacatttgattcaattgttgagctgtagttagaatactcaatttttaatttttttaatttttttattttttattttctttttggtttggggagggagaaaagttcttagcacaaatgttttacataatttgtaccaaaaaaaaaaaaaaaggaaaggaaagaaaggggtggcctgacactggtggcactactaagtgtgtgtttttttaaaaaaaaaatggaaaaaaaaaagcctttaaactggagagacttctgacaacagctttgcctctgtattgtgtaccagaatataaatgatacacctctgaccccagcgttctgaataaaatgctaattttggataacaaaaaaaggggaattc

SEQ ID NO: 292 - DNA, 5198 bp, Homo sapiens
ctcacttaaacacgtagttcccgcgaccccaacgtcccagaggcggggccggagtcggcggtggcgctccttggagccggctcccgctcctaccctgcaaacagacctcagctccgcggaagttgcgagacggggtttcaccatgttggtcgggctggtctggaaatcctgacttcaggtgatccacccgcctcggcctcccaaaatgctgggattacaagcgtgagccaccgcccctgacatgagccattgacttttaaagcaggagaataatttggatcagatttatatggaaacactcttctagcagcattatggggacttttccataagtctggatactgaggatttggaattaaagaaatcattcaccagacatcatggagcctatatatccttttgcacggccccagatgaataccaggtttccttcaagcaggatggtacctttccactttcctccatcaaaatgtgcactttggaacccaacgccaactggagatttcatctacttacatctcagttactacagaaatccaaagcttgtggtgactgagaagaccatccgacttgcttatcgtcatgctaacgagaataaaaaaaattcgtcatgctttttacttggttctctgacagcagacgaagatgaagaaggtgtaacattgacagtagatcgctttgatcctggtcgagaagtacctgaatgcctagaaataacccctactgcttctcttcctggggactttttgattccatgcaaagttcatactcaagaactttgttcaagagaaatgatagttcacagtgtagatgacttcagttcagctttaaaggctctacagtgccatatatgtagcaaagattccttggactgtggtaagctgctttccctaagagttcatatcacttccagggagagtttggacagtgtggaatttgacttgcattgggcagcagtaactctagcaaataactttaaatgcacacctgtgaagcccatccccattattccaacagctctggcaagaaacttgagcagtaatctgaatatttctcaagttcaagggacttataaatatggatatcttaccatggatgaaacacgcaaattgttacttttgttggaatctgatcccaaggtttattctctaccattggtgggaatttggctgtctggaattacacatatctatagtcctcaggtatgggcttgctgtttgcgatacatattcaattcttctgttcaagaaagggttttttcagaatctggaaatttcatcatagttctctattctatgacacataaggaacctgagttttatgaatgcttcccttgtgatggcaagatacctgactttcggtttcagttgctaaccagtaaggaaacattacatcttttcaaaaatgttgaacctcctgacaaaaatccaatccgttgtgaactgagcgctgaaagccaaaatgcagaaacagagtttttcagtaaggcttccaagaatttttcaattaagaggtcttcccaaaagttatcttctgggaagatgccaatacatgatcacgactctggtgttgaagatgaagatttttctccaagaccaattcctagtcctcatccagtgagtcagaagatttctaagatccaaccatcagttcctgaactttcacttgtgttggatggcaatttcatagaatcaaaccctctgcctactccattggaaatggtgaataatgaaaatcctcctttgattaaccacttggaacacttgaagccattgcaaccccagctttatgatgagaaacacagtccagaagttgaagctggagagccttccttgagaggaataccaaatcagttaaaccaggataaaccagctcttttgagacactgcaaagtaagacagccacctgcctataagaaagggaacccccataccaggaacagtattaaaccatcttctcataatgggccatctcatgatatatttgaaaagctccaaacagtttctgctggaaatgtacaaaacgaagagtatcctataagaccctccacacttaattctaggcagtcttctcttgccccgcagtcccaaccacacgattttgttttttcaccccataattcaggaagaccaatggaacttcagatacctactcccccactgccatcttactgttccacaaacgtttgcaggtgttgtcagcatcatagtcatattcaatatagtccgctaaattcttggcaaggagcaaacacagttggatccattcaagatgtccagtctgaagcccttcaaaagcattcattatttcacccaagtggatgtccagccctgtactgtaatgcattctgttcttcaagtagtcctatagccttgagacctcagggagatatgggcagttgttctccccacagcaatattgaaccatcgcctgtggcaagaccgccttcacatatggacttatgtaacccacagccttgcacagtgtgcatgcacacacccaagactgagtcagataatggaatgatgggactatctccagatgcatatcggttcctcacagaacaagacagacagctaagactacttcaggcacagattcagcgtttgttggaagcacagtctctgatgccctgttcccctaagacaactgctgttgaagacacagtgcaagctggaagacaaatggagttggtttctgtggaagcacagtcttcccctggcttgcacatgagaaaaggtgtaagcattgctgtgagcacaggtgctagcttgttttggaatgcagcaggtgaggatcaagagcctgactctcaaatgaagcaagatgataccaaaatttccagtgaggacatgaatttttctgtcgatattaataatgaagtcacaagtcttccaggtagtgcatcttcattaaaagcagttgatattcccagttttgaagagagcaacattgctgtggaagaagaatttaaccagccactttctgtatccaactcttctctagttgtgagaaaagaacctgatgtacctgtgttctttccaagtggccagctggcagaaagtgtaagcatgtgtttacagactggaccaacagggggtgccagtaacaattctgaaacatcagaggaaccaaaaattgagcatgtaatgcaacccttgcttcatcaaccatcagataaccagaaaatttaccaggatttattgggtcaagtaaaccacctattaaatagttcctccaaggaaactgagcagccgtctaccaaagcagtaattatcagtcatgaatgcaccagaacccaaaacgtttaccatacaaagaaaaaaacacatcattcaagactggtggacaaagattgtgtccttaatgcaactcttaagcaactaagaagccttggagtaaaaattgattctcccactaaagtgaagaaaaatgcacataacgtggatcacgccagtgtgttggcatgcatcagcccagaagcagtgatctctggattaaactgcatgtcatttgctaatgttggcatgagcggcttaagccccaatggtgtggatttgagcatggaggcaaatgctatagctctgaaatatttaaatgaaaatcagctgtcacaactgtctgtcactcgatcgaaccaaaataattgtgacccattcagccttctccatattaatacagacagaagcacagtggggcttagtttaatttcaccaaacaacatgtcatttgcaaccaaaaaatatatgaagagatatggactcctacaaagcagtgacaatagtgaagatgaagaggaacctcccgacaatgcagatagcaagagtgaatatttattgaatcagaaccttaggtccatacccgaacagcttggtggtcagaaagagccttctaagaatgaccatgaaataattaattgttctaactgtgaatctgtggggaccaacgcagatacgccagtattgagaaatattacaaatgaagttttgcagacaaaagcaaaacagcagttgactgaaaagccagctttcttagtaaagaaccttaaaccaagtcctgcagtgaaccttcgaaccgggaaagcagagttcactcaacatcctgagaaagaaaatgaaggggacattacaatttttcctgaaagtttgcaaccttctgaaacgctaaagcagatgaatagcatgaattcagtaggcaccttcttagatgtaaaacgtctcagacagttaccaaaattattttaaccttttaactccctgcccttttaatacagggacagggtgtctcctgaagatacttagggaaaacaggagcctaccacaaggctcctgatcattctggagtcactgtttcttggtagcagccaattgggaagagtgacttctgtgagatggctggctggtgataggactaagttctcattgttcaaatagagctgttcaacatcactgaaacctttaagaaaagccctgagatcagttattcctacaagtttaagtagtagacagatactatccagctctaagtctcaactgctcttttatactgtacttttttttttgagacggagttttgctcttgtagcccaggctggagtgcaatggcaggatctcagatcactgcaacctctgcctcctgggttcaagcgattttcctgcttcatcttcccaggtagctgggattacaggcatgtgccacaacgcctggctaattttgtatttttagtagagactggtttctccatgttggtcaggctggtctcaaactcccgacctcaggtgatccgcccgcctcggcctcctaaagtgctgggattacaggcgtgagccactgcccagctatactgtatatttaagaaggtccagcatgttgcatctctgcattatcctatatcataaaagaagcataagttatcatggtgttgggtaaattagcgaaatcaaccgcttcctaagtttaagggaaaagttatttttaaaaacaacttaataaaaacttacactcttatacaagagtgtatttccccttaattaggatgcatgttgattaaactcgagatacagctttttgcagtatggtgggttggttttggtgtaacatcttcaacatgtcacactggctatcaaagaataagaaaattattgagtatgagtgtgttttataaactttctgagtttttcagatgtcttaatattttt

SEQ ID NO: 293 - DNA, 4333 bp, Homo sapiens
cgcagagcgcgcacccaagcggccggacctccccgactcccgggccgcccccgtctcgcgccctgcctccctccttcggccttcacctacccgcctccggattggccgctaggaatcccgcccctctaaagccctgcctgctattggtcacgattttataatcaatggataaagtgggaaaaatgtggaataacttcaaatacaggtgtcagaatctcttcggtcatgagggaggaagccgtagtgaaaatgtggacatgaactccaacagatgtttgtctgtcaaagagaaaaacatcagcataggagactcaactcctcagcaacaaagcagtcccttaagagaaaatattgccttacaactgggattaagcccttcgaagaattcttcaaggagaaatcaaaattgtgccacagaaatccctcaaattgttgaaataagcatcgaaaaggataatgattcttgtgttaccccaggaacaagacttgcacgaagagattcctactctcgacatgctccatggggtgggaagaaaaaacattcctgttctacaaagacccagagttcattggatgctgataaaaagtttggtagaactcgaagtggacttcaaaggagagagaggcgctacggcgtaagttctgtacacgacatggacagtgtttccagcagaactgtaggaagtcgctctctaagacagaggttgcaggatactgtgggcttgtgttttcccatgagaacttacagcaagcagtcaaagcctctcttttccaataaaagaaaaatccatctctctgaattaatgcttgagaaatgcccttttcctgctggctcagatttagcccaaaaatggcatttgattaaacagcatacagctcctgtgagcccacattcaacattttttgatacatttgatccatctttggtttctacagaagatgaagaagataggcttagagagagaaggcggcttagtattgaagaaggggttgatccccctcccaatgcacaaatacatacatttgaagctactgcacaggttaatccattatataaactgggaccaaaattagctcctggaatgactgaaataagtggggacagttctgcaattccacaagctaattgtgactcggaagaggatacaaccaccctgtgtttgcagtcacggaggcagaagcagcgtcagatatctggagacagccatacccatgttagcagacagggagcttggaaagtccacacacagattgattacatacactgcctcgtgcctgatttgcttcaaattacagggaatccctgttactggggagtgatggaccgttatgaagcagaagcccttctcgaagggaaacctgaaggcacgtttttgctcagggactctgcgcaagaggactacctcttctctgtgagcttccgccgctacaacagatccctgcatgcccgaattgagcagtggaatcacaactttagtttcgacgcccatgacccgtgtgtatttcactcctccactgtaacgggacttttagaacattataaagatcccagttcgtgcatgttttttgaaccattgcttactatatcactaaataggactttcccttttagcctgcagtatatctgtcgcgcggtaatctgcaggtgcactacgtatgatggaattgatgggctccctctaccctcaatgttacaggattttttaaaagagtatcattataaacaaaaagttagagttcgctggttggaacgagaaccagtcaaggcaaagtaaactctccggtccccaaaggttgttaactaggtccgctttcatgtgcatcagacagtacacctatagcaagcacacgtagcagtgttaggctttttcatacagtatgtaagcttagtgttagtatctgtcagatgctacctgctgttacttattcagataaacatggtgcctattggaacaatagcggatagagctacaggtgttcagtaagactacaaaaacattttgcctatttcgctaacagtttggtttttaatggctgtggtatttgagtgaggcaactctggggcatttgttatgaagaattctatttcttactgaagaacaaattattaatattggatgagtatttcaacagtgtgactaatgtttgaaattattttttctaagagtttttctataaccttccaaaagtcgtgatgtttgtagttactataaatcaagctttggaagtccaaaaagaataaaagactgccttccttttagaaaaaaatgcaattttctggccacaagggcatagtgcagttcacttacgtgttgatgtagtttataatcagacgccttttctcttctgcaaaaggtactgttaagtaaaccagattttctaaataggcattcttaaaatttcagacttacaaagctagtagtagaattttattgaaaggcctaggtattaattttttaaatgagtgctttaacttaaaacaggcgtttggaatagctgctgcaatgtagtcttgtgtgtgatttttttttaagttgatgtgcagtctaattgttgtttcataaaagttggatctgttcctatgcccaggatgattttgtgaaccgtgaagtacgtgagactagaagacgcccaaacaagtcagataatagtaactacaatggttgctgatgttgagattattgttgaactataattaataatttggatggcagaatttatctcttttttgtaaactctcataactgaattgcttaagtataatttatagaatttcagtgcagttcattcttaatggaaaatctgaaacctaaattgcagatttaaaaggtactgtacaaccattatatctgtaaataacttagcacctttttgtcacttagaataatatgtactactacttgagtgagcgcttttggaagttatatcaagttctagtgtttgcttcttagtaactgaactgaatttacagttctgtcctagacattttgcactaaagtagccgaatccactctcatgtcttttcgttaatgtgctctgtaccactggtgagtgctccatagtttccttacctgctgctacagaatgttattttacatccctatggctattgccaaggctacaaaaaaggaaagctatatttgtatgcaacactaaccttttgactgctaatgtatgtttctgcttgctgtgccttgttatggctgctttttttgtgctaataaagtatgtttggtgttctccttgtatatctgctgttttatacatttgcaacaatttctcttgtaaatggaatggtttggggtttttaaataagcattaactaacaacctttctatagttaatgcagagttaatgaacagtctaatattgacttatcagaataagctaactctaaatttaatgctctacatcttatcagtcataattatatatactgtggaacagtatctgtagttactgcaaattactgtacagtttaggttataacagaaaactgacagagaagtaataaacctattgatttctctgcttataaatgaaagattgaaactatccaatgacatattatagtaaatgagtatctgtaacctcccactgcatcagaagcaggttaaatgaagtcttgtgaatttgtaatagatcagtaccatttattggtttggggaccatcttaattaaaaataaatgcccaaaatgtagaactttaaccaaagacttgtcccttttaaagcaaaatggggattgaagggacttataatttctgttgtttctaattaaagtccctgaagatcatataccaaagtgtttgagaacttcatccaaacctactttaaagcattatgtgcaattaagttgttatgacataattatattgcctaattgttgggtcttttttcttgagcttataatgtacctggaaaataaacctcttgagaaaaagaaaagttcatactgattattggaaaaggactatatatgtgagcaagattgtgttttagagaggaaacttgaaactccaagaaagcacttgatgtttttatatgcttgtagcaaattgatgttctaactgtagttttatagaaagtattaatgcttttatgtatttcaaaactttcatatgttaaatggaaattgttttaaatgtgtttgagtttatgtaagcatgtatacactgtgctaaaagtcacatgtttcagtttgtgtataatattaatatgcaatttttggtttaaatttttgtcttaaaatattagtggcttacattttaaaaaagaaaaatcaccagcatgaacttgcaaaaaaaaaaaaaaaaaaaaaaaaaaaaaaaaaa

SEQ ID NO: 294 - DNA, 2088 bp, Homo sapiens
gcgagggagggggaggagagagagggaggcggagggcagtgagagacgcatttccagttctcaactacgagccacgagtttgcagatggggctgctcggcggcgcctgtggctgagggagagcagcggcggcggggagcgaccgggagcggcggcagcggcggcgcggaggcggctgaggtgcgagccgcaatgcagcaagtcttggaaaaccttacggagctgccctcgtctactggagcagaagaaatagacctaattttcctcaagggaattatggagaatcctattgtaaaatcacttgctaaggctcgtgagaggctagaagattccaaactagaagctgtcagtgacaataacttggaattagtcaatgaaattcttgaagacatcactcctctaataaatgtggatgaaaatgtggcagaattggttggtatactcaaagaacctcacttccagtcactgttggaggcccatgatattgtggcatcaaagtgttatgattcacctccatcaagcccagaaatgaataattcttctatcaataatcagttattaccagtagatgccattcgtattcttggtattcacaaaagagctggggaaccactgggtgtgacatttagggttgaaaataatgatctggtaattgcccgaatcctccatgggggaatgatagatcgacaaggtctacttcatgtgggagatataattaaagaagtcaatggccatgaggttggaaataatccaaaggaattacaagaattactgaaaaatattagtggaagtgtcaccctaaaaatcttaccaagttatagagataccattactcctcaacaggtatttgtgaagtgtcattttgattataatccatacaatgacaacctaataccttgcaaagaagcaggattgaagttttccaaaggagagattcttcagattgtaaatagagaagatccaaattggtggcaggctagccatgtaaaagagggaggaagcgctggtctcattccaagccagttcctggaagagaagagaaaggcatttgttagaagagactgggacaattcaggacctttttgtggaactataagtagcaaaaaaaagaaaaagatgatgtatctcacaaccagaaatgcagaatttgatcgtcatgaaatccagatatatgaggaggtagccaaaatgcctcccttccagagaaaaacattagtattgataggagctcaaggtgtaggccgaagaagcttgaaaaacaggttcatagtattgaatcccactagatttggaactacggtgccatttacttcacggaaaccaagggaagatgaaaaagatggccaggcatataagtttgtgtcacgatctgagatggaagcagatattaaagctggaaagtatttggaacatggggaatatgaaggaaatctctatggaaccaaaattgattctattcttgaggttgtccaaactggacggacttgcattctggatgtcaacccacaagcactgaaagtattgaggacatcagagtttatgccctatgtggtatttattgcggctccggagctagagacgttacgtgccatgcacaaggctgtggtggatgcaggaatcactaccaagcttctgaccgactctgacttgaagaaaacagtggatgaaagtgcacggattcagagagcatacaaccactattttgatttgatcatcataaatgataatctagacaaagcctttgaaaaactgcaaactgccatagagaaactgagaatggaaccacagtgggtcccaatcagctgggtttactgatgattcagtaaggttaacaatgaaaattaaactcttaaaaagtgactgcaacaaataaaccttctactgagaaaatacatcacagatagaagattatctgctaagtccaggcatttttatggtgtagattgaaataatagtacacttctgaatttttatataaaatgtggttggaaggtgtactaatatataatttatcttaatttttctaactttgtatggataatctttatcttcatatcacataaagaaatgcgttgaagcaaaaaaaaaa

SEQ ID NO: 295 - DNA, 2060 bp, Homo sapiens
ccacgcgtccgcggacgcgtgggctccttcaaggcagtaggaagatactaagcttattatctatggctgaagacaaacacaacaaaaacccacttaagatgttggaatctttgggcaaagaactcatttctggccttttggatgactttgtggaaaaaaatgtcctgaaattggaggaagaggagaagaaaaaaatttatgatgccaaacttcaagacaaagcccgggtcttggttgattctatacgacagaaaaaccaagaggcaggtcaagtctttgttcaaactttcctaaacatagacaaaaattccaccagtataaaagctcctgaggaaactgtggctggaccagatgagtcagtgggatctgcagctaccctcaagctttgccctcatgaagaattcctgaaactgtgtaaagaaagggctggagagatctatccaataaaggagagaaaggaccgcactcgtctggctctcatcatatgcaacacagagtttgatcatatgcctcccaggaatggggctgcccttgacatccttggaatgaagcagctgcttgagggtcttggctacactgtggaagtggaagagaaactcacagccagggacatggaatcagtgctgtggaaatttgctgcacgtgaagagcacaaatcctcagacagtacattcttggtgttcatgtctcatggcatcctggatgggatctgtgggactatgcacagtgaggaagaaccagatgtgttaccttatgataccatcttccggacattcaacaaccgtaattgcctcagtctaaaggacaaacctaaagtcatcattgtccaggcctgcagaggtgcaaatcgtggggaattgtgggtcagtgactctccaccagccttggcagacagcttttcacagtcatccgagaacctggaagaggatgctgtttacaagacccatgtagagaaggacttcattgctttctgttcctcaactccacataatgtgtcctggagagacataaaaaaaggttctctcttcattacacgactcatcacatgcttccaaaaatatgcttggtgctgtcatcttgaggaagtatttaggaaggtacaacaatcatttgaaaaaccaaatgttaaagcccagatgcccactgttgaacgactctctatgacaagatatttctacctctttcctggcaactgaaaataaaaatcacaggaaattcaaccatttatcagcttcaagaagcatttttatcagcacagcatccatgtttaaccttttgtctttcattaaagtgaaaacatatgaactgttctttggggtcctctaagaaagaatagaatttcaattaaaacaatggatggatggaaataaagtagaagaagaaaactggattttcttgttatattgcatataatgcctgcactttactgagtgaagagaactagtcatgacttgccctcagcagcagggtgaaaggagatggtgcacatctggagacaaggaccaaaaactgggtcacctgctcctttgatcactcatcaaaccttgcaactagaattatttggaagaatatttctaatttattatttaaccaacatcataggtcaagttcaattttttttcagaaagttgttatggtacctatgcatctttcttcttatccataaattaatttgctttcttgttgatgatttttcattccagatttccaagcttcaggaaaattttgttatttagcaaacacttggtaattgtctaaaataaattgggcctttgatttaagatggtataattgggtgtgcttgtatagaaagacagacattattagatacagaacatccaagagtgtgggaaatgtcagcaatgggaaagaaaatgttaaattttctggaaagtgaatgtcagtagaggaattttagcaacatggccatctgagccactgactaaggagatgtaccacttcaattacatacatgcagaatgctgaatagatatatcaggacatgctgaactgtattacaaataaaatgattctctagatatcaaaaaaaaaaaaaaaaa

SEQ ID NO: 296 - DNA, 3335 bp, Homo sapiens
gaattccgtttaaaattatccaactgccatagagctaaattcttttttggaaaattgaaccgaacttctactgaatacaagatgaaaatgtggttgctggtcagtcatcttgtgataatatctattactacctgtttagcagtttctgaggaagacaaaggatttggaccaatttttgaagagcagccaatcaataccatttatccagaggaatcactggaaggaaaagtctcactcaactgtagggcacgagccagccctttcccggtttacaaatggagaatgaataatggggacgttgatctcacaagtgatcgatacagtatggtaggaggaaaccttgttatcaacaaccctgacaaacagaaagatgctggaatatactactgtttagcatctaataactacgggatggtcagaagcactgaagcaaccctgagctttggatatcttgatcctttcccacctgaggaacgtcctgaggtcagagtaaaagaagggaaaggaatggtgcttctctgtgaccccccataccattttccagatgatcttagctatcgctggcttctaaatgaatttcctgtatttatcacaatggataaacggcgatttgtgtctcagacaaatggcaatctctacattgcaaatgttgaggcttccgacaaaggcaattattcctgctttgtttccagtccttctattacaaagagcgtgttcagcaaattcatcccactcattccaatacctgaacgaacaacaaaaccatatcctgctgatattgtagttcagttcaaggatgtatatgcattgatgggccaaaatgtgaccttagaatgttttgcacttggaaatcctgttccggatatccgatggcggaaggttctagaaccaatgccaagcactgctgagattagcacctctggggctgttcttaagatcttcaatattcagctagaagatgaaggcatctatgaatgtgaggctgagaacattagaggaaaggataaacatcaagcaagaatttatgttcaagcattccctgagtgggtagaacacatcaatgacacagaggtggacataggcagtgatctctactggccttgtgtggccacaggaaagcccatccctacaatccgatggttgaaaaatggatatgcgtatcataaaggggaattaagactgtatgatgtgacttttgaaaatgccggaatgtatcagtgcatagctgaaaacacatatggagccatttatgcaaatgctgagttgaagatcttggcgttggctccaacttttgaaatgaatcctatgaagaaaaagatcctggctgctaaaggtggaagggtgataattgaatgcaaacctaaagctgcaccgaaaccaaagttttcatggagtaaagggacagagtggcttgtcaatagcagcagaatactcatttgggaagatggtagcttggaaatcaataacattacaaggaatgatggaggtatctatacatgctttgcagaaaataacagagggaaagctaatagcactggaacccttgttatcacagatcctacgcgaattatattggccccaattaatgccgatatcacagttggagaaaacgccaccatgcagtgtgctgcgtcctttgatcctgccttggatctcacatttgtttggtccttcaatggctatgtgatcgattttaacaaagagaatattcactaccagaggaattttatgctggattccaatggggaattactaatccgaaatgcgcagctgaaacatgctggaagatacacatgcactgcccagacaattgtggacaattcttcagcttcagctgaccttgtagtgagaggccctccaggccctccaggtggtctgagaatagaagacattagagccacttctgtggcacttacttggagccgtggttcagacaatcatagtcctatttctaaatacactatccagaccaagactattctttcagatgactggaaagatgcaaagacagatcccccaattattgaaggaaatatggaggcagcaagagcagtggacttaatcccatggatggagtatgaattccgcgtggtagcaaccaatacactgggtagaggagagcccagtataccatctaacagaattaaaacagacggtgctgcaccaaatgtggctccttcagatgtaggaggtggaggtggaagaaacagagagctgaccataacatgggcgcctttgtcaagagaataccactatggcaacaattttggttacatagtggcatttaagccatttgatggagaagaatggaaaaaagtcacagttactaatcctgatactggccgatatgtccataaagatgaaaccatgagcccttccactgcatttcaagttaaagtcaaggccttcaacaacaaaggagatggaccttacagcctagtagcagtcattaattcagcacaagacgctcccagtgaagccccaacagaagtaggtgtaaaagtcttatcatcttctgagatatctgttcattgggaacatgttttagaaaaaatagtggaaagctatcagattcggtattgggctgcccatgacaaagaagaagctgcaaacagagttcaagtcaccagccaagagtactcggccaggctcgagaaccttctgccagacacccagtattttatagaagtcggggcctgcaatagtgcagggtgtggacctccaagtgacatgattgaggctttcaccaagaaagcacctcctagccagcctccaaggatcatcagttcagtaaggtctggttcacgctatataatcacctgggatcatgtcgttgcactatcaaatgaatctacagtgacgggatataaggtactctacagacctgatggccagcatgatggcaagctgtattcaactcacaaacactccatagaagtcccaatccccagagatggagaatacgttgtggaggttcgcgcgcacagtgatggaggagatggagtggtgtctcaagtcaaaatttcaggtgcacccaccctatccccaagtcttctcggcttactgctgcctgcctttggcatccttgtctacttggaattctgaatgtgttgtgacagctgctgttcccatcccagctcagaagacacccttcaaccctgggatgaccacaattccttccaatttctgcggctccatcctaagccaaataaattatactttaacaaactattcaactgatttacaacacacatgatgactgaggcattcaggaaccccttcatccaaaagaataaacttttaaatggatataaatgatttttaactcgttccaa

SEQ ID NO: 297 - DNA, 1566 bp, Homo sapiens
gagtcagcccccgggggaggccatgaacgccacggggaccccggtggcccccgagtcctgccaacagctggcggccggcgggcacagccggctcattgttctgcactacaaccactcgggccggctggccgggcgcggggggccggaggatggcggcctgggggccctgcgggggctgtcggtggccgccagctgcctggtggtgctggagaacttgctggtgctggcggccatcaccagccacatgcggtcgcgacgctgggtctactattgcctggtgaacatcacgctgagtgacctgctcacgggcgcggcctacctggccaacgtgctgctgtcgggggcccgcaccttccgtctggcgcccgcccagtggttcctacgggagggcctgctcttcaccgccctggccgcctccaccttcagcctgctcttcactgcaggggagcgctttgccaccatggtgcggccggtggccgagagcggggccaccaagaccagccgcgtctacggcttcatcggcctctgctggctgctggccgcgctgctggggatgctgcctttgctgggctggaactgcctgtgcgcctttgaccgctgctccagccttctgcccctctactccaagcgctacatcctcttctgcctggtgatcttcgccggcgtcctggccaccatcatgggcctctatggggccatcttccgcctggtgcaggccagcgggcagaaggccccacgcccagcggcccgccgcaaggcccgccgcctgctgaagacggtgctgatgatcctgctggccttcctggtgtgctggggcccactcttcgggctgctgctggccgacgtctttggctccaacctctgggcccaggagtacctgcggggcatggactggatcctggccctggccgtcctcaactcggcggtcaaccccatcatctactccttccgcagcagggaggtgtgcagagccgtgctcagcttcctctgctgcgggtgtctccggctgggcatgcgagggcccggggactgcctggcccgggccgtcgaggctcactccggagcttccaccaccgacagctctctgaggccaagggacagctttcgcggctcccgctcgctcagctttcggatgcgggagcccctgtccagcatctccagcgtgcggagcatctgaagttgcagtcttgcgtgtggatggtgcagccaccgggtgcgtgccaggcaggccctcctggggtacaggaagctgtgtgcacgcagcctcgcctgtatggggagcagggaacgggacaggcccccatggtcttcccggtggcctctcggggcttctgacgccaaatgggcttcccatggtcaccctggacaaggaggtaaccaccccacctccccgtaggagcagagagcaccctggtgtgggggcgagtggttccccacaaccccgcttctgtgtgattctggggaagtcccggcccctctctgggcctcagtagggctcccaggctgcaaggggtggactgtgggatgcatgccctggcaacattgaagttcgatcatggtaaaaaa

SEQ ID NO: 298 - DNA, 552 bp, Homo sapiens
ctcatatttcacacagatgagttggcgaggaagatcgacctattattggtctaggccaataataggtcgatcttcctcgccaactcatatttcacacagatgaatctcagtagaggaaaatcgacctattattggcctagaccaaggcgctatgtacagcctcctgaagtgattgggcctatgcggcccgagcagttcagtgatgaagtggaaccagcaacacctgaagaaggggaaccagcaactcaacgtcaggatcctgcagctgctcaggagggagaggatgagggagcatctgcaggtcaagggccgaagcctgaagctgatagccaggaacagggtcacccacagactgggtgtgagtgtgaagatggtcctgatgggcaggagatggacccgccaaatccagaggaggtgaaaacgcctgaagaaggtgaaaagcaatcacagtgttaaaagaaggcacgttgaaatgatgcaggctgctcctatgttggaaatttgttcattaaaattctcccaataaagctttacagccttctgcaaagaaaa

SEQ ID NO: 299 - DNA, 530 bp, Homo sapiens
acgccagggagctgtgaggcagtgctgtgtggttcctgccgtccggactctttttcctctactgagattcatctgtgtgaaatatgagttggcgaggaagatcgacctatcggcctagaccaagacgctacgtagagcctcctgaaatgattgggcctatgcggcccgagcagttcagtgatgaagtggaaccagcaacacctgaagaaggggaaccagcaactcaacgtcaggatcctgcagctgctcaggagggagaggatgagggagcatctgcaggtcaagggccgaagcctgaagctcatagccaggaacagggtcacccacagactgggtgtgagtgtgaagatggtcctgatgggcaggagatggacccgccaaatccagaggaggtgaaaacgcctgaagaaggtgaaaagcaatcacagtgttaaaagaagacacgttgaaatgatgcaggctgctcctatgttggaaatttgttcattaaaattctcccaataaagctttacagccttctgcaaagaaaa

SEQ ID NO: 300 - DNA, 1152 bp, Homo sapiens
cgctcctcgggctgcccctcggttgacaatggtctccaggatggtctctaccatgctatctggcctactgttttggctggcatctggatggactccagcatttgcttacagcccccggacccctgaccgggtctcagaagcagatatccagaggctgcttcatggtgttatggagcaattgggcattgccaggccccgagtggaatatccagctcaccaggccatgaatcttgtgggcccccagagcattgaaggtggagctcatgaaggacttcagcatttgggtccttttggcaacatccccaacatcgtggcagagttgactggagacaacattcctaaggactttagtgaggatcaggggtacccagaccctccaaatccctgtcctgttggaaaaacagatgatggatgtctagaaaacacccctgacactgcagagttcagtcgagagttccagttgcaccagcatctctttgatccggaacatgactatccaggcttgggcaagtggaacaagaaactcctttacgagaagatgaagggaggagagagacgaaagcggaggagtgtcaatccatatctacaaggacagagactggataatgttgttgcaaagaagtctgtcccccatttttcagatgaggataaggatccagagtaaagagaagatgctagacgaaaacccacattacctgttaggcctcagcatggcttatgtgcacgtgtaaatggagtccctgtgaatgacagcatgtttcttacatagataattatggatacaaagcagctgtatgtagatagtgtattgtcttcacaccgatgattctgctttttgctaaattagaataagagcttttttgtttcttgggtttttaaaatgtgaatctgcaatgatcataaaaattaaaatgtgaatgtcaacaataaaaagcaagactatgaaaggctcagatttcttgcagtttaaaatggtgtctgaggttgtactattttggccaagtctgtagaaagctgtcatttgattttgattatgtagttcatccagcccttgggcattgttatacaccagtaaagaaggctgtactcaagaggaggagctgacacatttcacttggctgcgtcttaataaacatgaatgcaagcattggc

SEQ ID NO: 301 - DNA, 371 bp, Homo sapiens
gtagcgacagcagctccagccccgcctgagcaatgctagcacctcccccaggagactgttgccgtcggccagcccccttctccacggtaaccatgtgccaccgagagaccatgatcaaaaatgcagacatgtcggaagagatgcaacaggactcggtggagtgcgctattcaggcactggagaaatataacatagagaaggatattgcagctcatcttaagaaggaatttgacaagaagaacaatcccacctggcattgtatcgtggggaggaacttcggtagttacatgacacgtgaaatcaaacacttcatctacttctacctggaccaagtggccattctcttgttcaaatctggttaaaagcatggc

SEQ ID NO: 302 - DNA, 3829 bp, Homo sapiens
tcccactcggctcctcttacggagtcctcattccaccccccttgtttccgcattcatcctgagtggctggtgggaacgtgaaaagggagaggaaaaggcgcaagaagccagagagaggggtgtgggaaaagcgaaaacaggctgccaaatcaggggattccttccaatttaaaaaggaagtctgctgacgttagttagttaaatttaacatctttttatgtgtaacacttgactttggaagcaaaaatgaactttgcggagagagagggctctaagagatactgcattcaaacgaaacatgtggccattctctgtgcggtggtggtgggtgtaggattaatagtgggacttgccgtgggcttgaccagatcgtgtgactccagcggggacggcgggccgggcactgcgccagctccttcccacctgccttcttccacggccagcccctcaggtcctcctgcccaggaccaggacatctgcccggccagtgaggatgagagcggacagtggaaaaactttcgactgccggacttcgtcaacccagtccactacgacctgcacgtgaagcccctgttggaggaggacacctacacgggcaccgtgagcatctccatcaacctgagcgctcccacccggtacctgtggctgcacctccgggagaccaggatcacccggctcccggagctgaagaggccctctggggaccaggtgcaagtccggaggtgtttcgagtacaaaaagcaggagtacgtggtggtcgaggcggaggaagagcttacccccagcagtggagatggcctgtatctcctgaccatggagttcgccggctggctgaacggctccctcgtgggattttatagaaccacctacacggagaacggacgagtcaagagcatagtggccaccgatcatgaaccaacagatgccaggaaatcttttccttgttttgatgagcccaacaaaaaggcaacttatacaatatctatcacccatcccaaagaatacggagcactttcaaatatgccagtggcgaaagaagagtcagtggatgataaatggactcgaacaacttttgagaagtctgtccccatgagcacgtacctggtgtgctttgctgtacatcaatttgactctgtaaagagaatatcaaatagtggaaaacctcttacaatttatgtccagccagagcaaaagcacacagccgaatatgctgcaaacataactaaaagtgtgtttgattattttgaagaatactttgctatgaattattctcttcctaaattagataaaatcgctattccagattttggcactggtgccatggagaactggggactcatcacgtacagagaaacgaacctgctttatgaccctaaggaatcagcctcatcaaaccaacagagggtggccactgtggttgcccatgaacttgtgcatcagtggtttggaaatattgtgaccatggactggtgggaagacttgtggctaaatgaaggatttgcttctttctttgagtttctgggagtaaaccatgcagaaacagactggcaaatgcgtgaccaaatgttacttgaagatgtattacctgttcaagaggatgattctttgatgtcttcgcatccaattattgtgactgtgacaacccctgatgaaataacatctgtttttgatggaatatcctatagcaagggatcttctattttgagaatgcttgaagactggataaaaccagagaattttcaaaaaggatgtcagatgtacttggaaaaataccaattcaagaatgcaaaaacttctgatttttgggcagcactggaagaggcaagtaggctaccagtgaaagaagtaatggacacctggaccagacagatgggttatcctgtgcttaacgtgaacggtgtcaagaacatcacacagaaacgctttttgttggacccaagagctaacccttctcagcccccttcagatcttggttatacatggaatatcccagttaaatggactgaagataatataacaagcagtgtgttatttaataggtcagaaaaagaaggaatcactttgaactcctctaatcctagtggaaatgcttttctcaaaataaacccagatcatattgggttttatcgtgtaaattatgaagtagcaacttgggactcgatagctacagcgctctccttgaaccacaagacattttcttcagcagatcgtgcaagtcttattgatgatgcttttgccttggcaagagctcaacttctagattataaggtggctttgaacttgaccaagtatctcaaaagggaagagaattttttaccatggcagagagtaatttcagctgtaacctacatcattagcatgtttgaagatgataaagagctatatcctatgattgaggaatacttccaaggtcaagtgaagcctattgcagattctctgggatggaatgatgctggagaccatgtcacaaagttactccgttcctccgtgttagggtttgcgtgcaagatgggagacagagaagccttgaacaatgcttcctcgttatttgagcagtggctaaatgggactgtaagccttcccgtaaatctcaggcttctggtgtatcggtatgggatgcagaactctggcaatgagatttcatggaactacactcttgagcaataccagaaaacttcattagctcaagaaaaagaaaaactgctgtatggattagcatcagtgaagaacgttactcttttgtcaaggtatttggatttgctcaaggacacgaaccttattaaaactcaggatgtgtttacagtcattcgatatatctcatataacagctatgggaagaacatggcctggaattggatacaactcaactgggactatctagtcaacagatatacactcaataacagaaaccttggccgaattgtcacaatagcagagccattcaacactgaactgcaactgtggcagatggagagcttttttgcaaaatatccacaagctggagcaggagaaaaacctagggaacaagtgctggaaacagtgaaaaacaatatagagtggctaaaacaacatagaaacaccatcagagaatggttttttaatttacttgagagtggttaatgtattcaaatgttagagtttaattttgtgaatctattgtttctcctctgaagcatttggtggcctaatttacaagcacgatggagagagccttataaacagataatgcttttactaagcactgtgtttatatgtcttgcaaagcctttaaattgttcctctttgtttatgaagaaagatactaatagagtacttaatatactcagggattccttctaagtgtacttcataagatattctttacaaactgaagataatgaaatagttattttaatacctttaaatatcattctttgtatcttaaatctgtgaagtagaacaatttggtcttagctttacattttcagtaccaaagaaacaccacttaatcttctctcttgattgatttttaaagtttaaataccagtacttgagggaccaatattaccatcttaatctttattttattattcagaattatacagacctaatatcattttattcacatatgtcttactactttaaatcctaccaaagtaacctgggcttaagttttacttgaggatcatatgaattagccaaaagaatggctgactgttgcctttactcttataaaatcaataagagaactctcctctttttttaaaaataaatctaaatgattatcttgaaaaagtattgttttccagtgtcacttgactcttgaataaaaataactgcagtgttcccc

SEQ ID NO: 303 - DNA, 2010 bp, Homo sapiens
  misc_feature (235)..(235): n is a, c, g, or t
  misc_feature (258)..(258): n is a, c, g, or t
  misc_feature (302)..(302): n is a, c, g, or t
  misc_feature (364)..(364): n is a, c, g, or t
  misc_feature (392)..(392): n is a, c, g, or t
  misc_feature (424)..(424): n is a, c, g, or t
  misc_feature (567)..(567): n is a, c, g, or t
  misc_feature (646)..(646): n is a, c, g, or t
  misc_feature (1320)..(1320): n is a, c, g, or t
  misc_feature (1785)..(1785): n is a, c, g, or t
  misc_feature (1868)..(1868): n is a, c, g, or t
  misc_feature (1870)..(1874): n is a, c, g, or t
  misc_feature (1876)..(1876): n is a, c, g, or t
  misc_feature (1975)..(1975): n is a, c, g, or t
ttctgaggaacctagaaagattgtacaatgaatggtgattctcgtgctgcggtggtgacctcaccacccccgaccacagcccctcacaaggagaggtacttcgaccgagtagatgagaacaacccagagtacttgagggagaggaacatggcaccagaccttcgccaggacttcaacatgatggagcaaaagaagagggtgtccatgattctgcaaagccctaccagagtgaacnccgagcaggaacacttcctcatngtcccttttgggcttctttacagtgaagtgactgcatccagttnggttaagatcaatctacaaggagatatagtagatcgtggaagcactaatctgggagtgaatnaggccggcttcaccttacactctgcaantttatgctgcacgcccggacgtgaagtgcgtngtgcacattcacaccccagcaggggctgcggtctctgcaatgaaatgtggcctcttgccaatctccccggaggcgctttcccttggagaagtggcttatcatgactaccatggcattctggttgatgaagaggaaaaagtttngattcagaaaaatctggggcctaaaagcaaggttcttattctccggaaccatgggctcgtgtcagttggagagagcgtngaggaggccttctattacatccataaccttgtggttgcctgtgagatccaggttcgaactctggccagtgcaggaggaccagacaacttagtcctgctgaatcctgagaagtacaaagccaagtcccgttccccagggtctccggtaggggaaggcactggatcgcctcccaagtggcagattggtgagcaggaatttgaagccctcatgcggatgctcgataatctgggctacagaactggctacccttatcgataccctgctctgagagagaagtctaaaaaatacagcgatgtggaggttcctgctagtgtcacaggttactcctttgctagtgacggtgattcgggcacttgctccccactcagacacagttttcagaagcagcagcgggagaagacaagatggctgaactctggccggggcgacgaagcttccgaggaagggcagaatggaagcagtcccaagtcgaagactaagtggactaaagaggatggacatagaacttccacctctgctgtccctaacctgtttgttccattgaacactaacccaaaagaggtccaggagatgaggaacaagatccgagagcagaatttacaggacattaagacggctggccctcagtcccaggttttgtgtggtgtagtgatggacaggagcctcgtccaggnagagctggtgacggcctccaaggccatcattgaaaaggagtaccagccccacgtcattgtgagcaccacgggccccaaccccttcaccacactcacagaccgtgagctggaggagtaccgcagggaggtggagaggaagcagaagggctctgaagagaatctggacgaggctagagaacagaaagaaaagagtcctccagaccagcctgcggtcccccacccgcctcccagcactcccatcaagctggaggaagaccttgtgccggagccgactactggagatgacagtgatgctgccacctttaagccaactctccccgatctgtcccctgatgaaccttcagaagcactcggcttcccaatgttagagaaggaggaggaagcccatagacccccaagccccactgaggcccctactgaggccagccccgagccagccccagacccagccccggtggctgaagnaggctgccccctcagctgtcgaggagggggccgccgcggaccctggcagcgatgggtctccaggcaagtccccgtccaaaaanannnnnangttccgtaccccgtcctttctgaagaagagcaagaagaagagtgactcctgaaagccctgcgctaacactgtcctgtccggagcgacctggctctgcancgtccccggccacgtctgtgctctgtccttgtgta

SEQ ID NO: 304 - DNA, 4138 bp, Homo sapiens
cttctgtgctgttccttcttgcctctaacttgtaaacaagacgtactaggacgatgctaatggaaagtcacaaaccgctgggtttttgaaaggatccttgggacctcatgcacatttgtggaaactggatggagagatttggggaagcatggactctttagccagcttagttctctgtggagtcagcttgctcctttctggaactgtggaaggtgccatggacttgatcttgatcaattccctacctcttgtatctgatgctgaaacatctctcacctgcattgcctctgggtggcgcccccatgagcccatcaccataggaagggactttgaagccttaatgaaccagcaccaggatccgctggaagttactcaagatgtgaccagagaatgggctaaaaaagttgtttggaagagagaaaaggctagtaagatcaatggtgcttatttctgtgaagggcgagttcgaggagaggcaatcaggatacgaaccatgaagatgcgtcaacaagcttccttcctaccagctactttaactatgactgtggacaagggagataacgtgaacatatctttcaaaaaggtattgattaaagaagaagatgcagtgatttacaaaaatggttccttcatccattcagtgccccggcatgaagtacctgatattctagaagtacacctgcctcatgctcagccccaggatgctggagtgtactcggccaggtatataggaggaaacctcttcacctcggccttcaccaggctgatagtccggagatgtgaagcccagaagtggggacctgaatgcaaccatctctgtactgcttgtatgaacaatggtgtctgccatgaagatactggagaatgcatttgccctcctgggtttatgggaaggacgtgtgagaaggcttgtgaactgcacacgtttggcagaacttgtaaagaaaggtgcagtggacaagagggatgcaagtcttatgtgttctgtctccctgacccctatgggtgttcctgtgccacaggctggaagggtctgcagtgcaatgaagcatgccaccctggtttttacgggccagattgtaagcttaggtgcagctgcaacaatggggagatgtgtgatcgcttccaaggatgtctctgctctccaggatggcaggggctccagtgtgagagagaaggcataccgaggatgaccccaaagatagtggatttgccagatcatatagaagtaaacagtggtaaatttaatcccatttgcaaagcttctggctggccgctacctactaatgaagaaatgaccctggtgaagccggatgggacagtgctccatccaaaagactttaaccatacggatcatttctcagtagccatattcaccatccaccggatcctcccccctgactcaggagtttgggtctgcagtgtgaacacagtggctgggatggtggaaaagcccttcaacatttctgttaaagttcttccaaagcccctgaatgccccaaacgtgattgacactggacataactttgctgtcatcaacatcagctctgagccttactttggggatggaccaatcaaatccaagaagcttctatacaaacccgttaatcactatgaggcttggcaacatattcaagtgacaaatgagattgttacactcaactatttggaacctcggacagaatatgaactctgtgtgcaactggtccgtcgtggagagggtggggaagggcatcctggacctgtgagacgcttcacaacagcttctatcggactccctcctccaagaggtctaaatctcctgcctaaaagtcagaccactctaaatttgacctggcaaccaatatttccaagctcggaagatgacttttatgttgaagtggagagaaggtctgtgcaaaaaagtgatcagcagaatattaaagttccaggcaacttgacttcggtgctacttaacaacttacatcccagggagcagtacgtggtccgagctagagtcaacaccaaggcccagggggaatggagtgaagatctcactgcttggacccttagtgacattcttcctcctcaaccagaaaacatcaagatttccaacattacacactcctcggctgtgatttcttggacaatattggatggctattctatttcttctattactatccgttacaaggttcaaggcaagaatgaagaccagcacgttgatgtgaagataaagaatgccaccatcattcagtatcagctcaagggcctagagcctgaaacagcataccaggtggacatttttgcagagaacaacatagggtcaagcaacccagccttttctcatgaactggtgaccctcccagaatctcaagcaccagcggacctcggaggggggaagatgctgcttatagccatccttggctctgctggaatgacctgcctgactgtgctgttggcctttctgatcatattgcaattgaagagggcaaatgtgcaaaggagaatggcccaagccttccaaaacgtgagggaagaaccagctgtgcagttcaactcagggactctggccctaaacaggaaggtcaaaaacaacccagatcctacaatttatccagtgcttgactggaatgacatcaaatttcaagatgtgattggggagggcaattttggccaagttcttaaggcgcgcatcaagaaggatgggttacggatggatgctgccatcaaaagaatgaaagaatatgcctccaaagatgatcacagggactttgcaggagaactggaagttctttgtaaacttggacaccatccaaacatcatcaatctcttaggagcatgtgaacatcgaggctacttgtacctggccattgagtacgcgccccatggaaaccttctggacttccttcgcaagagccgtgtgctggagacggacccagcatttgccattgccaatagcaccgcgtccacactgtcctcccagcagctccttcacttcgctgccgacgtggcccggggcatggactacttgagccaaaaacagtttatccacagggatctggctgccagaaacattttagttggtgaaaactatgtggcaaaaatagcagattttggattgtcccgaggtcaagaggtgtacgtgaaaaagacaatgggaaggctcccagtgcgctggatggccatcgagtcactgaattacagtgtgtacacaaccaacagtgatgtatggtcctatggtgtgttactatgggagattgttagcttaggaggcacaccctactgcgggatgacttgtgcagaactctacgagaagctgccccagggctacagactggagaagcccctgaactgtgatgatgaggtgtatgatctaatgagacaatgctggcgggagaagccttatgagaggccatcatttgcccagatattggtgtccttaaacagaatgttagaggagcgaaagacctacgtgaataccacgctttatgagaagtttacttatgcaggaattgactgttctgctgaagaagcggcctaggacagaacatctgtataccctctgtttccctttcactggcatgggagacccttgacaactgctgagaaaacatgcctctgccaaaggatgtgatatataagtgtacatatgtgctggaattctaacaagtcataggttaatatttaagacactgaaaaatctaagtgatataaatcagattcttctctctcattttatccctcacctgtagcatgccagtcccgtttcatttagtcatgtgaccactctgtcttgtgtttccacagcctgcaagttcagtccaggatgctaacatctaaaaatagacttaaatctcattgcttacaagcctaagaatctttagagaagtatacataagtttaggataaaataatgggattttcttttcttttctctggtaatattgacttgtatattttaagaaataacagaaagcctgggtgacatttgggagacatgtgacatttatatattgaattaatatccctacatgtattgcacattgtaaaaagttttagttttgatgagttgtgagtttaccttgtatactgtaggcacactttgcactgatatatcatgagtgaataaatgtcttgcctactcaaaaaaaaaaaa

SEQ ID NO: 305 - DNA, 2387 bp, Homo sapiens
cctcgtgccgcggaccccagcctctgccaggttcggtccgccatcctcgtcccgtcctccgccggcccctgccccgcgcccagggatcctccagctcctttcgcccgcgccctccgttcgctccggacaccatggacaagttttggtggcacgcagcctggggactctgcctcgtgccgctgagcctggcgcagatcgatttgaatataacctgccgctttgcaggtgtattccacgtggagaaaaatggtcgctacagcatctctcggacggaggccgctgacctctgcaaggctttcaatagcaccttgcccacaatggcccagatggagaaagctctgagcatcggatttgagacctgcaggtatgggttcatagaagggcatgtggtgattccccggatccaccccaactccatctgtgcagcaaacaacacaggggtgtacatcctcacatccaacacctcccagtatgacacatattgcttcaatgcttcagctccacctgaagaagattgtacatcagtcacagacctgcccaatgcctttgatggaccaattaccataactattgttaaccgtgatggcacccgctatgtccagaaaggagaatacagaacgaatcctgaagacatctaccccagcaaccctactgatgatgacgtgagcagcggctcctccagtgaaaggagcagcacttcaggaggttacatcttttacaccttttctactgtacaccccatcccagacgaagacagtccctggatcaccgacagcacagacagaatccctgctaccagtacgtcttcaaataccatctcagcaggctgggagccaaatgaagaaaatgaagatgaaagagacagacacctcagtttttctggatcaggcattgatgatgatgaagattttatctccagcaccatttcaaccacaccacgggcttttgaccacacaaaacagaaccaggactggacccagtggaacccaagccattcaaatccggaagtgctacttcagacaaccacaaggatgactgatgtagacagaaatggcaccactgcttatgaaggaaactggaacccagaagcacaccctcccctcattcaccatgagcatcatgaggaagaagagaccccacattctacaagcacaatccaggcaactcctagtagtacaacggaagaaacagctacccagaaggaacagtggtttggcaacagatggcatgagggatatcgccaaacacccagagaagactcccattcgacaacagggacagctgcagcctcagctcataccagccatccaatgcaaggaaggacaacaccaagcccagaggacagttcctggactgatttcttcaacccaatctcacaccccatgggacgaggtcatcaagcaggaagaaggatggatatggactccagtcatagtacaacgcttcagcctactgcaaatccaaacacaggtttggtggaagatttggacaggacaggacctctttcaatgacaacgcagcagagtaattctcagagcttctctacatcacatgaaggcttggaagaagataaagaccatccaacaacttctactctgacatcaagcaataggaatgatgtcacaggtggaagaagagacccaaatcattctgaaggctcaactactttactggaaggttatacctctcattacccacacacgaaggaaagcaggaccttcatcccagtgacctcagctaagactgggtcctttggagttactgcagttactgttggagattccaactctaatgtcaatcgttccttatcaggagaccaagacacattccaccccagtggggggtcccataccactcatggatctgaatcagatggacactcacatgggagtcaagaaggtggagcaaacacaacctctggtcctataaggacaccccaaattccagaatggctgatcatcttggcatccctcttggccttggctttgattcttgcagtttgcattgcagtcaacagtcgaagaaggtgtgggcagaagaaaaagctagtgatcaacagtggcaatggagctgtggaggacagaaagccaagtggactcaacggagaggccagcaagtctcaggaaatggtgcatttggtgaacaaggagtcgtcagaaactccagaccagtttatgacagctgatgagacaaggaacctgcagaatgtggacatgaagattggggtgtaacacctacaccattatcttggaaagaaacaaccgttggaaacataaccattacagggagctgggacacttaacagatgcaatgtgctactgattgtttcattgcgaatcttttttagcataaaattttctactcttaaaaaaaaaaaaaaaaaaaaa

SEQ ID NO: 306 - DNA, 484 bp, Homo sapiens
ccgttcgctccggacaccatggacaagttttggtggcacgcagcctggggactctgcctcgtgccgctgagcctggcgcagatcgatttgaatataacctgccgctttgcaggtgtattccacgtggagaaaaatggtcgctacagcatctctcggacggaggccgctgacctctgcaaggctttcaatagcaccttgcccacaatggcccagatggagaaagctctgagcatcggatttgagacctgcagtttgcattgcagtcaacagtcgaagaaggtgtgggcagaagaaaaagctagtgatcaacagtggcaatggagctgtggaggacagaaagccaagtggactcaacggagaggccagcaagtctcaggaaatggtgcatttggtgaacaaggagtcgtcagaaactccagaccagtttatgacagctgatgagacaaggaacctgcagaatgtggacatgaagattggggtgtaa

SEQ ID NO: 307 - DNA, 3795 bp, Homo sapiens
  misc_feature (433)..(433): n is a, c, g, or t
  misc_feature (846)..(846): n is a, c, g, or t
  misc_feature (848)..(849): n is a, c, g, or t
  misc_feature (853)..(853): n is a, c, g, or t
  misc_feature (856)..(857): n is a, c, g, or t
  misc_feature (859)..(859): n is a, c, g, or t
  misc_feature (864)..(865): n is a, c, g, or t
  misc_feature (872)..(872): n is a, c, g, or t
  misc_feature (877)..(881): n is a, c, g, or t
  misc_feature (883)..(890): n is a, c, g, or t
  misc_feature (892)..(892): n is a, c, g, or t
  misc_feature (903)..(904): n is a, c, g, or t
  misc_feature (918)..(918): n is a, c, g, or t
  misc_feature (978)..(978): n is a, c, g, or t
  misc_feature (981)..(981): n is a, c, g, or t
  misc_feature (1633)..(1633): n is a, c, g, or t
  misc_feature (2564)..(2564): n is a, c, g, or t
  misc_feature (2864)..(2864): n is a, c, g, or t
  misc_feature (3121)..(3134): n is a, c, g, or t
  misc_feature (3300)..(3300): n is a, c, g, or t
  misc_feature (3307)..(3307): n is a, c, g, or t
  misc_feature (3328)..(3328): n is a, c, g, or t
  misc_feature (3359)..(3359): n is a, c, g, or t
  misc_feature (3476)..(3476): n is a, c, g, or t
  misc_feature (3542)..(3542): n is a, c, g, or t
  misc_feature (3570)..(3571): n is a, c, g, or t
  misc_feature (3587)..(3587): n is a, c, g, or t
  misc_feature (3624)..(3624): n is a, c, g, or t
  misc_feature (3646)..(3646): n is a, c, g, or t
  misc_feature (3672)..(3672): n is a, c, g, or t
  misc_feature (3685)..(3685): n is a, c, g, or t
  misc_feature (3701)..(3702): n is a, c, g, or t
  misc_feature (3725)..(3726): n is a, c, g, or t
  misc_feature (3730)..(3733): n is a, c, g, or t
  misc_feature (3739)..(3739): n is a, c, g, or t
  misc_feature (3748)..(3748): n is a, c, g, or t
  misc_feature (3757)..(3757): n is a, c, g, or t
  misc_feature (3771)..(3771): n is a, c, g, or t
  misc_feature (3777)..(3777): n is a, c, g, or t
gggagacccaagcttctagagatccctcgacctcgagatccattgtgctctaaagagcggaccccagcctctgccaggttcggtccgccatcctcgtcccgtcctccgccggcccctgccccgcgcccagggatcctccagctcctttcgcccgcgccctccgttcgctccggacaccatggacaagttttggtggcacgcagcctggggactctgcctcgtgccgctgagcctggcgcagatcgatttgaatataacctgccgctttgcaggtgtattccacgtggagaaaaatggtcgctacagcatctctcggacggaggccgctgacctctgcaaggctttcaatagcaccttgcccacaatggcccagatggagaaagctctgagcatcggatttgagacctgcaggtatgggttcatagaagggcangtggtgattccccggatccaccccaactccatctgtgcagcaaacaacacaggggtgtacatcctcacatccaacacctcccagtatgacacatattgcttcaatgcttcagctccacctgaagaagattgtacatcagtcacagacctgcccaatgcctttgatggaccaattaccataactattgttaaccgtgatggcacccgctatgtccagaaaggagaatacagaacgaatcctgaagacatctaccccagcaaccctactgatgatgacgtgagcagcggctcctccagtgaaaggagcagcacttcaggaggttacatcttttacaccttttctactgtacaccccatcccagacgaagacagtccctggatcaccgacagcacagacagaatccctgctaccantnnggangannanatcanntgtgctncccannnnnannnnnnnngnagacagcaacnncaagaggcaagaancctgggattggttttcatggttgtttctaccatcagagtcaaagaatcatcttcacacancancacaaatggctggtacgtcttcaaataccatctcagcaggctgggagccaaatgaagaaaatgaagatgaaagagacagacacctcagtttttctggatcaggcattgatgatgatgaagattttatctccagcaccatttcaaccacaccacgggcttttgaccacacaaaacagaaccaggactggacccagtggaacccaagccattcaaatccggaagtgctacttcagacaaccacaaggatgactgatgtagacagaaatggcaccactgcttatgaaggaaactggaacccagaagcacaccctcccctcattcaccatgagcatcatgaggaagaagagaccccacattctacaagcacaatccaggcaactcctagtagtacaacggaagaaacagctacccagaaggaacagtggtttggcaacagatggcatgagggatatcgccaaacacccaaagaagactcccattcgacaacagggacagctgcagcctcagctcataccagccatccaatgcaaggaaggacaacaccaagcccagaggacagttcctggactgatttcttcaacccaatctcacaccccatgggacgaggtcatcaagcaggaagaaggatggatatggactccagtcatagtanaacgcttcagcctactgcaaatccaaacacaggtttggtggaagatttggacaggacaggacctctttcaatgacaacgcagcagagtaattctcagagcttctctacatcacatgaaggcttggaagaagataaagaccatccaacaacttctactctgacatcaagcaataggaatgatgtcacaggtggaagaagagacccaaatcattctgaaggctcaactactttactggaaggttatacctctcattacccacacacgaaggaaagcaggaccttcatcccagtgacctcagctaagactgggtcctttggagttactgcagttactgttggagattccaactctaatgtcaatcgttccttatcaggagaccaagacacattccaccccagtggggggtcccataccactcatggatctgaatcagatggacactcacatgggagtcaagaaggtggagcaaacacaacctctggtcctataaggacaccccaaattccagaatggctgatcatcttggcatccctcttggccttggctttgattcttgcagtttgcattgcagtcaacagtcgaagaaggtgtgggcagaagaaaaagctagtgatcaacagtggcaatggagctgtggaggacagaaagccaagtggactcaacggagaggccagcaagtctcaggaaatggtgcatttggtgaacaaggagtcgtcagaaactccagaccagtttatgacagctgatgagacaaggaacctgcagaatgtggacatgaagattggggtgtaacacctacaccattatcttggaaagaaacaaccgttggaaacataaccattacagggagctgggacacttaacagatgcaatgtgctactgattgtttcattgcgaatcttttttagcataaaattttctactcttttngttttttgtgttttgttctttaaagtcaggtccaatttgtaaaaacagcattgctttctgaaattagggcccaattaataatcagcaagaatttgatcgttccagttcccacttggaggcctttcatccctcgggtgtgctatggatggcttctaacaaaaactacacatatgtattcctgatcgccaacctttcccccaccagctaaggacatttcccagggttaatagggcctggtccctgggaggaaatttgaatgggtccattttgcccttccatagcctaatccctgggcattgntttccactgaggttgggggttggggtgtactagttacacatcttcaacagaccccctctagaaatttttcagatgcttctgggagacacccaaagggtgaagctatttatctgtagtaaactatttatctgtgtttttgaaatattaaaccctggatcagtcctttgatcagtataattttttaaagttactttgtcagaggcacaaaagggtttaaactgattcataataaatatctgtacttcttcgatcttcannnnnnnnnnnnnnattcttcagtttctaaaccagcactgtctgggtccctacaatgtatcaggaagagctgagaatggtaaggagactcttctaagtcttcatctcagagaccctgagttcccactcagacccactcagccaaatctcatggaagaccaaggagggcagcactgttttngtttttngttttttgttttttttttttngacactgtccaaaggttttccatcctgtccntggaatcagagttggaagctgaggagcttcagcctcttttatggtttaatggccacctgttctctcctgtgaaaggctttgcaaagtcacattaagtttgcatgacctgttatcccntggggccctatttcatagaggctggccctattagtgatttccaaaaacaatatggaagtgcctttngatgtcttacaataagagaagaagccannggaaatgaaagagatnggcaaaggggaaggatgatgccatgtagatcctgttngacatttttatggctgtattgntaaacttaaacacaccagtgtctgtncttgatgcagtgnctattaggatgagtannagtgcctggggagtccctcaaannggtnnnngggatncccatcatnggaatcttnatcaccagataggncaagtntatgaccaaacaagagag

SEQ ID NO: 308 - DNA, 1539 bp, Homo sapiens
gctgactccagtgtcccgagaggcgccgcttcttccgctttctcgtcaggctcctgcaaccccaggcatgaaccaaggtttctgaactactgggcgggagccaacgtctcttctttctcccgctctggcggaggctttgtcgctgcgggctgggccccagggtgtcccccatggcggggccgcgggtggaggtcgatggcagcatcatggaagggggcggccagatcctgagagtctctacggccttgagctgtctcctaggcctccccttgcgggtgcagaagatccgagccggccggagcacgccaggcctgaggcctcaacatttatctggactggaaatgattcgagatttgtgtgatgggcaactggagggggcagaaattggctcaacagaaataacctttacaccagagaagatcaaaggtggaatccacacagcagataccaagacagcagggagtgtgtgcctcttgatgcaggtctcaatgccgtgtgttctctttgctgcttctccatcagaacttcatttgaaaggtggaactaatgctgaaatggcaccacagatcgattatacagtgatggtcttcaagccaattgttgaaaaatttggtttcatatttaattgtgacattaaaacaaggggatattacccaaaagggggtggtgaagtgattgttcgaatgtcaccagttaaacaattgaaccctataaatttaactgagcgtggctgtgtgactaagatatatggaagagctttcgttgctggtgttttgccatttaaagtagcaaaagatatggcagcggcagcagttagatgcatcagaaaggagatccgggatttgtatgttaacatccagcctgttcaagaacctaaagaccaagcatttggcaatggaaatggaataataattattgctgagacctccactggctgtttgtttgctggatcatcgcttggtaaacgaggtgtaaatgcagacaaagttggaattgaagctgccgaaatgctattagcaaatcttagacatggtggtactgtggatgagtatctgcaagaccagctgattgttttcatggcattagccaatggagtttccagaataaaaacaggaccagttacactccatacgcaaaccgcgatacattttgctgaacaaatagcaaaggctaaatttattgtgaagaaatcagaagatgaagaagacgccgctaaagatacttatattattgaatgccaaggaattgggatgacaaatccaaatctatagagtatttgcctcttaaatgatacctcattgatatattgcactatttcataaatactataaaataatgactaggaagtaacttattaaaggctatgacttaaatttgaagatgaagtacagtgttctaggtttgctgagaaggcttcattaaattaatctcactttgaatatctcctgagagatggacaatgaaatatcagttggtggatatgtgtgatagctgatttcaatattgaagtattgaaataaaatattctttacacctgag

SEQ ID NO: 309 - DNA, 2540 bp, Homo sapiens
gaaaaggtggacaagtcctattttcaagagaagatgacttttaacagttttgaaggatctaaaacttgtgtacctgcagacatcaataaggaagaagaatttgtagaagagtttaatagattaaaaacttttgctaattttccaagtggtagtcctgtttcagcatcaacactggcacgagcagggtttctttatactggtgaaggagataccgtgcggtgctttagttgtcatgcagctgtagatagatggcaatatggagactcagcagttggaagacacaggaaagtatccccaaattgcagatttatcaacggcttttatcttgaaaatagtgccacgcagtctacaaattctggtatccagaatggtcagtacaaagttgaaaactatctgggaagcagagatcattttgccttagacaggccatctgagacacatgcagactatcttttgagaactgggcaggttgtagatatatcagacaccatatacccgaggaaccctgccatgtattgtgaagaagctagattaaagtcctttcagaactggccagactatgctcacctaaccccaagagagttagcaagtgctggactctactacacaggtattggtgaccaagtgcagtgcttttgttgtggtggaaaactgaaaaattgggaaccttgtgatcgtgcctggtcagaacacaggcgacactttcctaattgcttctttgttttgggccggaatcttaatattcgaagtgaatctgatgctgtgagttctgataggaatttcccaaattcaacaaatcttccaagaaatccatccatggcagattatgaagcacggatctttacttttgggacatggatatactcagttaacaaggagcagcttgcaagagctggattttatgctttaggtgaaggtgataaagtaaagtgctttcactgtggaggagggctaactgattggaagcccagtgaagacccttgggaacaacatgctaaatggtatccagggtgcaaatatctgttagaacagaagggacaagaatatataaacaatattcatttaactcattcacttgaggagtgtctggtaagaactactgagaaaacaccatcactaactagaagaattgatgataccatcttccaaaatcctatggtacaagaagctatacgaatggggttcagtttcaaggacattaagaaaataatggaggaaaaaattcagatatctgggagcaactataaatcacttgaggttctggttgcagatctagtgaatgctcagaaagacagtatgcaagatgagtcaagtcagacttcattacagaaagagattagtactgaagagcagctaaggcgcctgcaagaggagaagctttgcaaaatctgtatggatagaaatattgctatcgtttttgttccttgtggacatctagtcacttgtaaacaatgtgctgaagcagttgacaagtgtcccatgtgctacacagtcattactttcaagcaaaaaatttttatgtcttaatctaactctatagtaggcatgttatgttgttcttattaccctgattgaatgtgtgatgtgaactgactttaagtaatcaggattgaattccattagcatttgctaccaagtaggaaaaaaaatgtacatggcagtgttttagttggcaatataatctttgaatttcttgatttttcagggtattagctgtattatccattttttttactgttatttaattgaaaccatagactaagaataagaagcatcatactataactgaacacaatgtgtattcatagtatactgatttaatttctaagtgtaagtgaattaatcatctggattttttattcttttcagataggcttaacaaatggagctttctgtatataaatgtggagattagagttaatctccccaatcacataatttgttttgtgtgaaaaaggaataaattgttccatgctggtggaaagatagagattgtttttagaggttggttgttgtgttttaggattctgtccattttcttgtaaagggataaacacggacgtgtgcgaaatatgtttgtaaagtgatttgccattgttgaaagcgtatttaatgatagaatactatcgagccaacatgtactgacatggaaagatgtcagagatatgttaagtgtaaaatgcaagtggcgggacactatgtatagtctgagccagatcaaagtatgtatgttgttaatatgcatagaacgagagatttggaaagatatacaccaaactgttaaatgtggtttctcttcggggagggggggattgggggaggggccccagaggggttttagaggggccttttcactttcgacttttttcattttgttctgttcggattttttataagtatgtagaccccgaagggttttatgggaactaacatcagtaacctaacccccgtgactatcctgtgctcttcctagggagctgtgttgtttcccacccaccacccttccctctgaacaaatgcctgagtgctggggcactttg

SEQ ID NO: 310 - DNA, 1805 bp, Homo sapiens
aagagactgaactgtatctgcctctatttccaaaagactcacgttcaactttcgctcacacaaagccgggaaaattttattagtcctttttttaaaaaaagttaatataaaattatagcaaaaaaaaaaaggaacctgaactttagtaacacagctggaacaatcgcagcggcggcggcagcggcgggagaagaggtttaatttagttgattttctgtggttgttggttgttcgctagtctcacggtgatggaagctgcacattttttcgaagggaccgagaagctgctggaggtttggttctcccggcagcagcccgacgcaaaccaaggatctggggatcttcgcactatcccaagatctgagtgggacatacttttgaaggatgtgcaatgttcaatcataagtgtgacaaaaactgacaagcaggaagcttatgtactcagtgagagtagcatgtttgtctccaagagacgtttcattttgaagacatgtggtaccaccctcttgctgaaagcactggttcccctgttgaagcttgctagggattacagtgggtttgactcaattcaaagcttcttttattctcgtaagaatttcatgaagccttctcaccaagggtacccacaccggaatttccaggaagaaatagagtttcttaatgcaattttcccaaatggagcaggatattgtatgggacgtatgaattctgactgttggtacttatatactctggatttcccagagagtcgggtaatcagtcagccagatcaaaccttggaaattctgatgagtgagcttgacccagcagttatggaccagttctacatgaaagatggtgttactgcaaaggatgtcactcgtgagagtggaattcgtgacctgataccaggttctgtcattgatgccacaatgttcaatccttgtgggtattcgatgaatggaatgaaatcggatggaacttattggactattcacatcactccagaaccagaattttcttatgttagctttgaaacaaacttaagtcagacctcctatgatgacctgatcaggaaagttgtagaagtcttcaagccaggaaaatttgtgaccaccttgtttgttaatcagagttctaaatgtcgcacagtgcttgcttcgccccagaagattgaaggttttaagcgtcttgattgccagagtgctatgttcaatgattacaattttgtttttaccagttttgctaagaagcagcaacaacagcagagttgattaagaaaaatgaagaaaaaacgcaaaaagagaacacatgtagaaggtggtggatgctttctagatgtcgatgctgggggcagtgctttccataaccaccactgtgtagttgcagaaagccctagatgtaatgatagtgtaatcattttgaattgtatgcattattatatcaaggagttagatatcttgcatgaatgctctcttctgtgtttaggtattctctgccactcttgctgtgaaattgaagtggatgtagaaaaaaccttttactatatgaaactttacaacacttgtgaaagcaactcaatttggtttatgcacagtgtaatatttctccaagtatcatccaaaattccccacagacaaggctttcgtcctcattaggtgttggcctcagcctaaccctctaggactgttctattaaattgctgccagaattttacatccagttacctccactttctagaacatattctttactaatgttattgaaaccaatttctacttcatactgatgtttttggaaacagcaattaaagtttttcttccatg

SEQ ID NO: 311 - DNA, 1524 bp, Homo sapiens
ttccagccctggccccaccttcccttcagcagtccgtgttgtctgggtagtctgtggccagtgtagccctgttgcagagtgaggtctccgctgaaaggagaactggcgtggtcgttgtttgaaaagaatcaggccccagcaaggttcactggaagctaacactggacgcagcagagtctgggtctgacaggaggtcagcgtcaccattttgagggtgatggacatgttttctgcactctagcactgtgtggaagcgctggctgacagcagcctggctgtccgaattccaaagaaatgggctccttctaaatattcaggtgctgctgcatactcgggagcacacgctttccttgcccttgcaggtgggggtgtccttggatggagagggtgctcctctgtgccgcgtctcagcagccccaccagagctgcctccccttccccatgcaggtgcagggagctcacctgaggctgaggcaggcccaggcccagcacttgcaggaggtccggctggtgccccaggaccgtgtggccgagctgcatcgcctgctcagccttcagggagagcaggccaggaggcgcctggatgcacagcgggaagaacatgagaaacagctgaaagccacagaagagcgggtggaagaggcggagatgattctgaagagtatggaaatgctcctccaagagaaagtggataagctgaaggagcagtttgaaaagaacacgaagtccgacctgctgctgaaggagctgtacgtggagaacgcccacctggtgagagcacttcaggccaccgaggagaagcagcgaggcgccgagaaacaaagccgcctcttggaagaaaaagttcgcgctctcaacaaactcgtcggtaggattgcccccgcagccctctctgtgtaaagacagattattttctaggattcattcgaaagcacatcttttaaataagccactgtgctgccttagattccgtgggtcatgagccatgagtcctgggacatctgaggattgggattctttgttcaccccgcagatagttaatgaatggtctgccctgggcaagatggaggtgggggctgggggaatatgcatgttgcagaagccggcgtttttattagcggtcctgagtaatttcccttggcaaaattcccagttttgccactcgctggagccagatcctgggagctgtcagcaaggagcaggtaagtgagcagttatggacagcactttccatgtggtgcttccgaccctggctgtcagagtgaaatgtaaagtcagggctctgtacagttttgccatttcactgttctgctttaagcttagcttattagaactcttggtggagggtgcgtacacacattccagaaaaggcttcactcgctgggaacgtcaacccagcgagaaaggaggggaagccccttctccggggaccttatctgtggactcagggatgatggtgtttattgcaaatgcacaatctttttcccattgaaatgtcatcacactggaaattgtactatatgt

SEQ ID NO: 312 - DNA, 1019 bp, Homo sapiens
tgatgggaatcctgtcattcttacctgtccttgccactgagagtgactgggctgactgcaagtccccccagccttggggtcatatgcttctgtggacagctgtgctattcctggctcctgttgctgggacacctgcagctcccccaaaggctgtgctgaaactcgagccccagtggatcaacgtgctccaagaggactctgtgactctgacatgccgggggactcacagccctgagagcgactccattcagtggttccacaatgggaatctcattcccacccacacgcagcccagctacaggttcaaggccaacaacaatgacagcggggagtacacgtgccagactggccagaccagcctcagcgaccctgtgcatctgactgtgctttctgagtggctggtgctccagacccctcacctggagttccaggagggagaaaccatcgtgctgaggtgccacagctggaaggacaagcctctggtcaaggtcacattcttccagaatggaaaatccaagaaattttcccgttcggatcccaacttctccatcccacaagcaaaccacagtcacagtggtgattaccactgcacaggaaacataggctacacgctgtactcatccaagcctgtgaccatcactgtccaagctcccagctcttcaccgatggggatcattgtggctgtggtcactgggattgctgtagcggccattgttgctgctgtagtggccttgatctactgcaggaaaaagcggatttcagccaattccactgatcctgtgaaggctgcccaatttgagatgctttcctgcagccacctggacgtcaaatgattgccatcagaaagagacaacctgaagaaaccaacaatgactatgaaacagctgacggcggctacatgactctgaaccccagggcacctactgacgatgataaaaacatctacctgactcttcctcccaacgaccatgtcaacagtaataactaaagagtaacgttatgccatgtggtcatctaga

SEQ ID NO: 313 - DNA, 967 bp, Homo sapiens
tgatgggaatcctgtcattcttacctgtccttgccactgagagtgactgggctgactgcaagtccccccagccttggggtcatatgcttctgtggacagctgtgctattcctggctcctgttgctgggacacctgcagctcccccaaaggctgtgctgaaactcgagccccagtggatcaacgtgctccaagaggactctgtgactctgacatgccgggggactcacagccctgagagcgactccattcagtggttccacaatgggaatctcattcccacccacacgcagcccagctacaggttcaaggccaacaacaatgacagcggggagtacacgtgccagactggccagaccagcctcagcgaccctgtgcatctgactgtgctttctgagtggctggtgctccagacccctcacctggagttccaggagggagaaaccatcgtgctgaggtgccacagctggaaggacaagcctctggtcaaggtcatattcttccagaatggaaaatccaagaaattttcccgttcggatcccaacttctccatcccacaagcaaaccacagtcacagtggtgattaccactgcacaggaaacataggctacacgctgtactcatccaagcctgtgaccatcactgtccaagctcccagctcttcaccgatggggatcattgtggctgtggtcactgggattgctgtagcggccattgttgctgctgtagtggccttgatctactgcaggaaaaagcggatttcagccacctggacgtcaaatgattgccatcagaaagagacaacctgaagaaaccaacaatgactatgaaacagctgacggcggctacatgactctgaaccccagggcacctactgacgatgataaaaacatctacctgactcttcctcccaacgaccatgtcaacagtaataactaaagagtaacgttatgccatgtggtcatctaga

SEQ ID NO: 314 - DNA, 1647 bp, Homo sapiens
gaattctgtgataagttattcaacttatgaaattcaagttacatgtgaattctgccaggcaatacaaggacctgtggaatatgagtgatgacaaaccctttctatgtactgcgcctggatgtggccagcgttttaccaacgaggatcatttggctgtccataaacataaacatgagatgacactgaaatttggtccagcacgtaatgacagtgtcattgtggctgatcagaccccaacaccaacaagattcttgaaaaactgtgaagaagtgggtttgtttaatgagttggcgagtccatttgagaatgaattcaagaaagcttcagaagatgacattaaaaaaatgcctctagatttatcccctcttgcaacacctatcataagaagcaaaattgaggagccttctgttgtagaaacaactcaccaggatagtcctttacctcacccagagtctactaccagtgatgagaaggaagtaccattggcacaaactgcacagcccacatcagctattgttcgtccagcatcattacaggttcccaatgtgctgcttacaagttctgactcaagtgtaattattcagcaggcagtaccttcaccaacctcaagtactgtaatcacccaggcaccatcctctaacaggccaattgtccctgtaccaggcccatttcctcttctgttacatcttcctagtggacaaaccatgcctgttgctattcctgcatcaattacaagttctaatgtgcatgttccagctgcagtcccactcgttcgaccagtcaccatggtgcctagtgttccaggaatcccaggtccttcctctccccaaccagtacagtcagaagcaaaaatgagattaaaagctgctttgacccagcaacatcctccagttaccaatggtgatactgtcaaaggtcatggtagcggattggttaggactcagtcagaggaatctcgaccgcagtcattacaacagccagccacatccactacagaaactccggcttctccagctcacacaactccacagacccaaagtacaagtggtcgtcggagaagagcagctaacgaagatcctgatgaaaaaaggagaaagtttttagagcgaaatagagcagcagcttcaagatgccgacaaaaaaggaaagtctgggttcagtctttagagaagaaagctgaagacttgagttcattaaatggtcagctgcagagtgaagtcaccctgctgagaaatgaagtggcacagctgaaacagcttcttctggctcataaagattgccctgtaaccgccatgcagaagaaatctggctatcatactgctgataaagatgatagttcagaagacatttcagtgccgagtagtccacatacggaagctatacagcatagttcggtcagcacatccaatggagtcagttcaacctccaaggcagaagctgtagccacttcagtcctcacccagatggcggaccagagtacagagcctgctctttcacagatcgttatggctccttcctcccagtcacagccctcaggaagttgattaaaaacctgcagtacaacagtttagatactcattagtgacttcaaagggaaatcaaggaaagaccagtttccatttatgcgaaatctgtggttgtaaattt

SEQ ID NO: 315 - DNA, 1180 bp, Homo sapiens
cgggggaggagcccaagatgcctctgctgctccttggagagacagagcctcttaagttggagcgggactgccggagcccagtggacccctgggctgctgccagccccgacctggcacttgcttgcctgtgtcactgtcaggatttgtctagcggcgcattccctaacaggggtgtgttggggggagtcctctttccaactgtcgaaatggttatcaaagtgtttgttgctacatcttctgggtccatagcgattaggaagaaacagcaagaagtagtgggttttttggaagcgaataaaatcgactttaaggaattagatattgctggagatgaagacaacaggaggtggatgagagagaatgttcctggagagaaaaaacctcaaaatgggattcctttgcctccccagatcttcaatgaggagcagtactgtggggattttgactctttcttctctgcaaaagaagagaatattatttattccttccttggtttggctcctcctccagactcaaagggatcagagaaggctgaagaaggtggagaaactgaggcacaaaaagagggcagtgaagatgtgggcaacctccctgaagcccaggagaagaatgaagaagaaggagagacagccacagaagagacggaagaaatagccatggagggtgcggaaggggaagccgaggaggaggaagaaactgcagaaggagaagagcctggagaagacgaagattcctaggccttttcatgcttcatttcttccacttctccagaaaatggaagctatgaagcaacatttcaaatgtctctccacaaaccaaactcaacagaatactttggcttgaagccggcacacccagggttactgaggacttatgctgcctgacctggttagatgtacatggaggtatctcccgaatcaataccttcatgtgcctgacagtcttggcttttgaagatttttttttcttttttgctctgcgatagctagaccatcttattaataatactctgaaaaaaatgatttcaaggcatggaagttctctgtgatacaacaatacgtattcttcaaatgcgccttatgctacttatctcagaaacaggttttaaaatgaagtgctttccagagaaccatcatataaataaagattaatagaaaaataaaaaaaaaaaaaaaaaaaa

SEQ ID NO: 316 - DNA, 954 bp, Homo sapiens
  misc_feature (345)..(345): n is a, c, g, or t
  misc_feature (390)..(390): n is a, c, g, or t
atgggaacagataaccagacttgggtgagtgaatttattctcctcggcctgtccagtgactgggacactcgggtctccctgtttgtcctgttcttggtcatgtatgtggtgaccgtgctggggaactgtctcattgtccttctgatcagactggacagccgactccacactcccatgtatttctttctcaccaacctctcccttgtcgatgtctcctatgccacaagtgtagtccctcagctgctggcacattttcttgcagaacataaagccatcccattccagagctgtgcagcccagttatttttctccctggccttgggtgggattgagtttgttctcctngcggtgatggcctatgaccgctatgtggctgtgtgtgatgccctncgatactcggccatcatgcatggagggctgtgtgctaggttggccatcacatcctgggtcagtggcttcatcagctctcctgtgcagactgctatcacctttcagctgcccatgtgcagaaacaagtttattgatcacatatcctgtgaactcctagctgtggtcaggctggcttgtgtggacacctcctccaatgaggtcaccatcatggtgtctagcattgttcttctgatgacacccctctgcctggttcttttgtcctacatccagatcatctccaccatcctaaagatccagtccagagaaggaagaaagaaagctttccacacgtgtgcctctcacctcacagtggttgccctgtgctatggtgtggccattttcacttacatccagccccactccagtccctctgtccttcaggagaagttgttctctgtcttttatgccattttaacaccaatgctgaaccccatgatttacagcctaaggaataaagaggtgaagggggcctggcagaaactattatggaaattctctgggttaacatcaaagctggcaacttga

SEQ ID NO: 317 - DNA, 954 bp, Homo sapiens; identical to SEQ ID NO: 316
  misc_feature (345)..(345): n is a, c, g, or t
  misc_feature (390)..(390): n is a, c, g, or t

SEQ ID NO: 318 - DNA, 10709 bp, Homo sapiens
agggggcggcgctcccggcccatcccttagccccgcggcggccgtgtgggccggaggctgcctgcaccgcgtcagggaggccggcctagaaaccctccctcccagaagaaagccgatcccagttcaggtggggtcttcctcggttgcgtacctggctggagccgagctggtgggcggccggcagccggcgtttctggtgatgacagccccgaaatgaaagcagcgcggccgccgcctccgagggctgcagggagatcagcgtccagcaaataagaagcaagtcctggacccggaggaggaggagcggccgagcatctctctctgctccgccgtgtcctttagatgagcactcccggccggagccggaggtggatccgcagagctgcctctgggcgcctgaccccgcgctgacatcacaacctgtgacaggcgcatcacgcccggtacctgctcccggccgctgcccgtcctcccagcctctttgtatgccgcagacatggccagccagcaggattcgggcttctttgagatcagtatcaaatatttactgaaatcctggagtaatacttctcccgttggcaacggttacatcaagcctccggttccacctgcttctggcacgcacagggagaaagggccgccaaccatgctacccatcaatgtggacccagacagtaaaccaggagaatatgtcctcaaaagtttatttgtcaacttcaccactcaggctgaacgcaagattcgtatcattatggcagagcccctggaaaagccattgacgaaatctctgcaacgtggagaagacccccaatttgatcaggtcatcagctcaatgagctccctttctgagtactgcctgccttccattctacgtacattatttgactggtataaaaggcaaaatggcattgaggatgaatcacatgaatacagaccaagaacaagcaataaatcaaaaagcgatgaacaacagcgagattatttaatggaaagacgggacctcgccattgattttattttttctttagtattaatagaagttttgaaacagattccacttcatcctgtaatagacagtttaatacatgatgttattaacttggctttcaagcactttaaatacaaagaagggtaccttggtcccaacactggcaatatgcatattgtggcagacctgtatgcagaagtcattggagtgttggcacaagccaaattccctgctgtaaagaagaaatttatggcggagctaaaagaattacggcacaaagagcagaacccatatgtggttcaaagcattatcagcttaataatgggcatgaaattctttcgaattaagatgtatccagtggaggattttgaggcctctcttcagtttatgcaggaatgtgcacattacttcctcgaggtcaaagacaaagatatcaagcatgccttggctgggctttttgttgaaatacttgttccagttgctgctgctgttaaaaatgaagtaaatgttccctgccttagaaattttgtggaaagcctgtatgacaccacgctggaactttcttctcgaaagaagcattccttggccttgtaccccctggtgacctgtttgctctgtgtcagtcagaagcagctgttcctgaacaggtggcacattttcctcaacaactgcttgtccaaccttaaaaacaaagatcccaagatggctcgagttgcactggaatctctctacagattactttgggtttacatgattcgaattaaatgtgaaagcaacacagctactcagagccgacttataaccatcatcacaacacttttccccaaagggtcccgcggtgtggtaccaagggacatgcctctgaacatctttgtgaaaatcatccagttcattgcccaggaacgtttagattttgcaatgaaagaaatcattttcgattttctttgtgtgggaaaaccagcaaaagcattcagtctcaacccagagagaatgaacattggtttacgggcattcttggtcatagctgatagcttgcagcagaaagatggggaacctcccatgccggttacaggagccgttcttccttcaggaaacacgttaagagtaaagaaaacatatttgagtaaaacactaactgaagaggaagccaaaatgataggcatgtccttatattactctcaagtacgaaaagctgtagacaacattttaaggcaccttgataaagaagtaggaaggtgtatgatgctgactaatgtacagatgttaaacaaagaaccggaagacatgatcacgggtgagagaaagccaaaaatagatcttttcaggacctgtgttgctgctattcctcgactgcttcctgatgggatgtcaaaacttgaacttattgacttactggctaggctctctattcatatggatgatgaattgcgacatattgcacaaaattctcttcagggtttacttgttgacttctcagattggagggaagatgtactatttggctttaccaacttcctgctccgggaagtaaatgatatgcatcacacactccttgattcgtccctgaagttgctgctgcagctgctcacccagtggaaactagtcatccagacacaaggaaaagtctatgaacaagccaacaaaatcagaaattcagagctcatcgcaaatggctccagtcacagaattcagtcggaacgaggtccccactgcagtgtactccacgctgtagaaggttttgctctggttttactctgcagtttccaggtggccacacgcaaactgtccgttttaatactcaaggaaattcgagcgttgtttattgccctggggcagcctgaggatgacgacaggccgatgattgatgtcatggatcagctaagttcttccattctagaaagttttattcatgtagcagtttcggattcagcaacattaccactcacccacaatgtggatctgcagtggttggtggaatggaacgcagtcctggtcaatagccattatgatgtgaaaagcccttcccatgtctggatatttgcacagtctgtcaaagacccctgggtcctctgcctcttcagcttcctccggcaggagaacttacccaagcactgccccacagccctcagctatgcctggccttatgccttcactcggctccagtcggtgatgcctctggtggacccaaatagcccaattaatgccaagaaaaccagcactgccggcagcggagacaactatgttactttgtggagaaattacctaattctttgttttggagttgcaaaacccagtattatgagcccaggacacttaagagcttccactccagaaataatggcgaccacacctgatggtacagtgagctacgataacaaggccataggcaccccatcggtgggagttctgttaaagcagttggtgcctttgatgagactagagagcattgagatcacagagtccttagttttaggatttggaagaacaaattcccttgttttcagagaattggtagaagaacttcatccattaatgaaagaagctctggaaagaagaccagagaacaagaaacgccgagaacggcgagacttgttaaggctacaactacttcgaatttttgaacttttggctgatgctggtgtaataagtgacagcacaaatggagccctagagcgggatactttagccctgggagctttgttcttagaatatgtggacttgacccgcatgctcctagaagctgaaaatgacaaagaagttgaaattcttaaagatatccgggcacattttagtgcaatggtggccaacttgattcagtgtgttccagttcaccaccgaagatttctcttcccccagcaaagtctgaggcaccaccttttcatcttattcagccagtgggcaggacccttcagcattatgttcactcctctggatcgttacagtgacagaaatcatcagattacaagatatcagtattgtgcattaaaagcaatgtcagcagtactgtgctgtggccctgtctttgacaatgtgggcctttccccagatggctacctatataaatggcttgacaacattctggcttgtcaagatttacgagttcatcaacttggctgcgaagttgttgtcttgctactggaacttaatcctgaccaaataaatctttttaactgggcaattgaccgatgctacacaggttcctaccaacttgcatctggctgcttcaaagccatagcaactgtgtgtggaagcaggaactatcccttcgacatagtgacattgttaaaccttgttctattcaaggcctctgacaccaacagagagatttatgaaatctccatgcagctcatgcagatccttgaagcaaagctttttgtatactcaaagaaagtcgctgagcaaagaccgggaagtattctctatggaacacacggcccgctgccacccctctacagcgtgtcactcgccctcttgtcatgtgagctggccaggatgtaccctgagctcacactccccctcttctcaggtaagccagcgattccccacaacacaccccaacgggcgccagatcatgcttacctacctgctgccctggctgcacaacatcgagctggtggacagcaggctcctcctcccgggtcgagccccagcagcccagaggacgaagtcaaggaccgggaaggtgacgtgactgcttctcacgggctgagaggaaatggctggggctctccagaagccacgtcactggtcctgaacaacctcatgtacatgacggccaagtatggagatgaagttcctgggccagaaatggaaaatgcttggaatgctttagccaacaatgagaaatggagcaacaacctgaggatcaccttgcagttcctgattagcctctgtggggtcagcagcgacacagttctcctaccctatattaaaaaagtggcaatatacttgtgccgtaacaacaccattcaaaccatggaagagcttctctttgagctgcagcagacagaacccgtgaaccccatcgtccagcattgtgacaacccgcccttctaccgcttcacggccagtagcaaggcttccgcagcagcctcaggaaccacctctagcagcaatacagtggttgctggccaggaaaatttcccagatgctgaggagaacaagatattgaaagaatctgatgaaaggtttagtaatgtcatcagagcccacactcgcctcgagtcaagatacagcaatagctctggaggatcctacgatgaagataaaaatgatccaatttctccctacacgggctggttgctgactattacagagaccaagcagccgcagcccttaccgatgccttgtactggaggatgctgggcccccctggttgactatctcccggagaccatcactccccgggggccactccacaggtgcaatattgctgtaatttttatgactgaaatggtggtggatcacagtgtacgagaagactgggcgcttcatctaccattattacttcatgctgtcttcttaggtttagaccactaccggcctgaagtctttgaacacagcaaaaaactgcttcttcacctcttgattgccctctcttgcaacagcaatttccattccattgcttccgtgctcctgcagacccgagagatgggtgaagctaagactctaaccgtgcagccagcctaccaacctgaatatctctatacaggtggctttgacttcctgagagaggaccagtcatccccggtgcctgactcagggcttagttcaagctccacctcctctagcatcagtctgggaggcagcagtggaaacctcccacagatgacccaggaggtagaagatgtggacacagctgctgaaacagatgagaaggcaaacaagctcattgagtttctcacgaccagggcatttggtccactttggtgccatgaagacatcacacctaaaaatcaaaattcaaagagtgctgaacagctcactaattttctacgtcacgttgtatctgtatttaaagattccaaatcaggcttccatctggagcaccagttgagtgaagttgcattgcagacagccctcgcaagctcttcaaggcactatgctggtcggtccttccagatattccgggccctcaagcaacctctgtcagcacatgccttatctgaccttctctcaagattggtggaggtgataggagaacatggagatgagattcagggttatgtaatggaagcgctcctaaccttggaggcggctgtggataacttgtctgactgcttgaagaacagtgacctcctaactgtattgtcccgctcttcctcaccagatttaagctccagcagtaaactaacagcaagcagaaagagcacaggacaactaaacatgaacccgggaaccaccagcggcaacaccgcaactgccgaacggagccggcatcaacgaagcttctctgtgcccaagaagtttggtgtcatcgaccgatcctctgacccacctcgaagtgccacactggacagaattcaggcttgtacccaacaaggcctctcctcaaaaaccagaagctcatcctccttgaaggacagtctcacggacccatcccacataaaccatcccaccaacctgctggccaccatattctgggtcacagtggccttgatggagtctgattttgagtttgaatacttaatggccttaaggctgttgagcagactactggcacatatgccactcgataaggctgagaaccgagaaaagcttgagaaactccaggcacagctgaagtgggccgacttctccgggctgcagcagctgctgctgaaaggattcacatccctcaccaccacagacctgaccctgcagctcttcagtctgctgacaccagtgtccaaaatatccatggtggatgcatcccacgctattgggtttccactgaatgtcttgtgtctcctgcctcagctgattcagcattttgaaaatcccaatcagttctgtaaggatatagccgaaaggattgctcaggtttgtttagaagagaagaaccccaaactttcaaatcttgcacatgtcatgactctttataaaacgcacagctacacgagggactgtgccacgtgggtcaatgtggtctgtcgataccttcatgaagcatatgctgacattaccttgaatatggttacctacctggcagagctgctggagaagggcctccctagtgtgcagcagcccctgctccaggtgatctacagtcttctcagctacatggacctttctgtcgttcctgtcaaacagttcaatgtggaagttctgaagacaattgaaaaatatgtgcaaagtgttcactggagagaagctctgaatatcttgaagctggtagtttctcggtcagccagccttgttttaccttcataccagcacagtgacctctcaaaaatagaaatacatcgagtgtggactagtgcttccaaggaattacctgggaaaaccctggacttccacttcgatatttcggagactccaatcatcgggaggcggtatgatgagctgcagaattcttctgggcgtgatgggaagcccagggccatggccgtcacccggagcacatcttccacttcctcaggctccaactccaacgtccttgttccagtgagctggaaaaggccccagtattctcagaagagaacaaaagagaagttggtacatgtcctttctctgtgtggccaagaagtaggattgagcaaaaatccatcagtgattttttcatcgtgtggggatctggatctgcttgagcaccagacaagcttggtatcttctgaggacggtgcccgagagcaggagaacatggatgacacaaacagcgagcagcagtttagagtcttcagagacttcgacttcctagatgtggagctggaggatggagagggtgagagtatggacaatttcaactggggagtgcgcagacgttctctggacagcctggataagtgtgatatgcagattctggaggagcgccaactgtcaggaagcactcctagcctgaataaaatgcaccatgaggactccgatgaatcatccgaggaggaggacctcacagccagccagatcctggagcactcagacctaatcatgactctctccccctctgaagagacgaatcccatggagctgctcaccacagcctgtgactcgacccctgcagaacctcattcctttaacaccagaatgtccagctttgatgcttccttgcctgatatgaataatctgcagatttctgagggttcaaaggctgaagctgttcgtgaggaggaggacaccaccgtgcatgaggatgatctttctagttccatcaatgaactcccagcagcttttgaatgcagcgacagctttagcctggacatgactgagggggaagaaaaaggcaatcgggcactggaccagtttaccctggcgagctttggagaaggtgacaggggagtctctccccctccctcgcccttcttctcagccatccttgccgcctttcagcccgcagcctgtgacgatgccgaggaggcctggcgcagccacatcaaccagcttatgtgtgactcagatggctcctgtgctgtgtatacatttcatgtgttctcctccttgtttaagaatattcagaaaaggttctgcttcctaacctgtgatgcagccagttaccttggagataacctccggggaatcggatccaaatttgtcagctcttcccagatgctcacctcctgctctgaatgtcctacactttttgtggatgccgagactctcctttcatgtggacttctggacaagctcaagttcagtgtgttagaactgcaagaatatttggatacctacaacaacaggaaagaggccacactctcttggcttgcaaattgtaaggcaacatttgcagggggatcaagagatggagtaattacctgtcaaccaggggactccgaagaaaagcaattggaactgtgtcagagattatataagctacacttccagctgctattgctttttcagtcctactgtaagctcatcggccaggtgcacgaagttagctccatgccagagctgctgaatatgtccagggaactgagtgacctaaagaaacacctgaaggaagccagtgcagtcattgcagctgaccctctctattcagacggcgcgtggtccgagcccaccttcacgtccactgaagcagccatccagtccatgctggagtgcctgaagaacaacgaactcggcaaagctttgcggcagatcagggagtgcagaagtctgtggcccaatgacatctttggaagcagttctgatgatgaggtccagacactactgaatatttatttccgtcaccaaactctgggacagacgggtacttatgccctggtggggtctaaccagagcctgaccgagatctgcaccaagctgatggagctgaacatggagatccgggacatgatccgcagggcccagagttaccgagtcctcactacttttcttccagactccagtgtttctggcactagtctctgacaggagcctcctgtccccactgggttccaaactgcagtgctgccatgctggggcaacgtcattcagtgtcttctcggccttcaaaaggcttggacagactgttctccctcttgttacctgtagggctttttctaaagaggatggcagaacttccaacgtgtagcaatactataagaaccaaggtagcttagaacgtcctggacagactccactcatcatgctgtgtggcacaaatgtgttacatttgaccgagcatatgcaactcgctactgaagaagtgacttccgttgcataccaaagccgactacactgaacagtaccttcctttctagaaacaattttagattggcaaaagtgcaatgttttcttcactcaaaaaattttatattctcaaacatgtatattctttccctgtcttgttccattttcttttcttttttcttttttctttttcctttctttcgtgggctgagaaaggggcaggcaaaatgaagctggccactgaaaactgtaagatggtcaaaagctgacagcctgtgtatgtgaaaagggaattgtaaatggactgcaatgtaatgtacactgtaatttgaatacaattactgtatctaaaaggagctgctatgaagtacctttcttatgttgctaggctactgtttctgaaagccctggatctctttgcaccaaaaatggtccagatagactctttttaaggatcttggctgctttttactagaaggttgcttttatgagcatatttatactgctgaaggatgagtgttaattttaattaactttgccgttttgtagagaaaactattcacaagataaattccaagtcttttcacctgtcaggcatgcatattttaatatctgtttggatagtcagaagtagaatcataaaggtaaaatatgagttgttactttgtttcttcgatgtcatattttatgtgtaatatatatgtaaagggccattcttaagttctctccttaaacttaatgctgtcaagtgttagatgtgtgcatgtgaacttgttgcactgcagaaacatattcagagtttatctatgtaacttattcactctgtaaatacatttaaagtttttgtgatgtaagcttaattgatattctgttcagaactttctttagactaaaaaaaaaaaaaaaagacaaa

SEQ ID NO: 319 - DNA, 835 bp, Homo sapiens
  misc_feature (332)..(335): n is a, c, g, or t
  misc_feature (740)..(742): n is a, c, g, or t
  misc_feature (744)..(749): n is a, c, g, or t
gtagttttattaaggaagccaggcatgcaacagatttgtgcatgaaatgagacttcctttcagtgtaagagcttaaagcaagctcagtcatacatgacaaagtgtaattaacactgatgttgtgttaaatttgcagcagagcttgagaaaagtacatgttctggaatttcatcattaacattttataatcttacactcacttctgtcttttgtgggttcaagagccctctgacttgtgaagaatttgctgccctcttaagagcttgctgacttgttttcttgtgaaaattttttgcacatctgaatatcgtggaagaaacaataaaactacnnnntgaggaaaactaaaggtctttatttaaaatctggcattgtattaacatgtaattttatactatgtggtattttatacatttcctcagtagtgatatttggtaaagcagttcatacagcttttttctaagttccatgaatcttacccagtgtttaccgaagtatttaagcagcatctgaatatttccacccagcaatgttaatttatctaggaaagttcagaatttcatcttcatgttgaatttcccttttaacttccgttcatagacatatatgtgacttccaattcgaccctctggcaagtgagtgtggaagaaaacagcagttcttttataattgcttgaaattaggaaagcgcttatttcctagaagcaaataaatgtttaagtaaataaaggctacatttnnntnnnnnnatgaaactctctatgtaaccagtttaagggatttaggtaaaatacatctgcttcatcaagataatgactttttccagtcaggtctg

SEQ ID NO: 320 - DNA, 6830 bp, Homo sapiens
  misc_feature (101)..(105): n is a, c, g, or t
  misc_feature (107)..(107): n is a, c, g, or t
  misc_feature (110)..(114): n is a, c, g, or t
  misc_feature (116)..(120): n is a, c, g, or t
  misc_feature (1005)..(1005): n is a, c, g, or t
  misc_feature (1009)..(1011): n is a, c, g, or t
  misc_feature (1014)..(1015): n is a, c, g, or t
  misc_feature (2504)..(2504): n is a, c, g, or t
  misc_feature (2800)..(2800): n is a, c, g, or t
  misc_feature (3059)..(3059): n is a, c, g, or t
  misc_feature (3063)..(3063): n is a, c, g, or t
  misc_feature (3065)..(3067): n is a, c, g, or t
  misc_feature (3179)..(3179): n is a, c, g, or t
  misc_feature (3189)..(3194): n is a, c, g, or t
  misc_feature (4371)..(4371): n is a, c, g, or t
  misc_feature (4687)..(4687): n is a, c, g, or t
  misc_feature (4759)..(4759): n is a, c, g, or t
  misc_feature (4771)..(4771): n is a, c, g, or t
  misc_feature (4811)..(4811): n is a, c, g, or t
  misc_feature (4818)..(4818): n is a, c, g, or t
  misc_feature (4826)..(4827): n is a, c, g, or t
  misc_feature (4840)..(4840): n is a, c, g, or t
  misc_feature (4846)..(4846): n is a, c, g, or t
  misc_feature (4887)..(4887): n is a, c, g, or t
  misc_feature (4892)..(4892): n is a, c, g, or t
  misc_feature (4896)..(4896): n is a, c, g, or t
  misc_feature (4924)..(4924): n is a, c, g, or t
  misc_feature (4931)..(4931): n is a, c, g, or t
  misc_feature (4939)..(4940): n is a, c, g, or t
  misc_feature (5044)..(5044): n is a, c, g, or t
  misc_feature (5109)..(5109): n is a, c, g, or t
  misc_feature (5844)..(5844): n is a, c, g, or t
  misc_feature (5855)..(5856): n is a, c, g, or t
  misc_feature (5903)..(5904): n is a, c, g, or t
  misc_feature (6378)..(6379): n is a, c, g, or t
  misc_feature (6383)..(6383): n is a, c, g, or t
  misc_feature (6408)..(6408): n is a, c, g, or t
  misc_feature (6418)..(6418): n is a, c, g, or t
  misc_feature (6426)..(6426): n is a, c, g, or t
  misc_feature (6428)..(6428): n is a, c, g, or t
  misc_feature (6438)..(6438): n is a, c, g, or t
  misc_feature (6440)..(6440): n is a, c, g, or t
  misc_feature (6442)..(6442): n is a, c, g, or t
  misc_feature (6457)..(6457): n is a, c, g, or t
  misc_feature (6655)..(6655): n is a, c, g, or t
  misc_feature (6720)..(6720): n is a, c, g, or t
  misc_feature (6791)..(6791): n is a, c, g, or t
tcctctttccgtgcgcgagtgcacagctccggaggcccgagccgaccctggggcgtccggtccggtggtcttgcagcctccaaaccccgagtgctataccnnnnngngcnnnnngnnnnnataagaggcgtcattggcgcccgagctgtgaccgccgccactggggcagccagcacaatcgggcggaggtggcgctgccccttcagacctgaaagatgtctgaaaattccagtgacagtgattcatcttgtggttggactgtcatcagtcatgaggggtcagatatagaaatgttgaattctgtgacccccactgacagctgtgagcccgccccagaatgttcatctttagagcaagaggagcttcaagcattgcagatagagcaaggagaaagcagccaaaatggcacagtgcttatggaagaaactgcttatccagctttggaggaaaccagctcaacaattgaggcagaggaacaaaagatacccgaagacagtatctatattggaactgccagtgatgattctgatattgttacccttgagccacctaagttagaagaaattggaaatcaagaagttgtcattgttgaagaagcacagagttcagaagactttaacatgggctcttcctctagcagccagtatactttctgtcagccagaaactgtattttcatctcagcctagtgacgatgaatcaagtagtgatgaaaccagtaatcagcccagtcctgcctttagacgacgccgtgctaggaagaagaccgtttctgcttcagaatctgaagaccggctagttgctgaacaagaaactgaaccttctaaggagttgagtaaacgtcagttcagtagtggtctcaataagtgtgttatacttgctttggtgattgcaatcagcatgggatttggccatttctatggcacaattcagattcagaagcgtcaacagttagtcagaaagatacatgaagatgaattgaatgatatgaaggattatctttccnagtnnnaanncaggaacaagaatcttttatagattataagtcattgaaagaaaatcttgcaaggtgttggacacttactgaagcagagaagatgtcctttgaaactcagaaaacgaaccttgctacagaaaatcagtatttaagagtatccctggagaaggaagaaaaagccttatcctcattacaggaagagttaaacaaactaagagaacagattagaatattggaagataaagggacaagtactgaattagttaaagaaaatcagaaacttaagcagcatttggaagaggaaaagcagaaaaaacacagctttcttagtcaaagggagactctgttgacagaagcaaagatgctaaagagagaactggagagagaacgactagtaactacggctttaaggggggaactccagcagttaagtggtagtcagttacatggcaagtcagattctcccaatgtatatactgaaaaaaaggaaatagcaatcttacgggaaagactcactgagctggaacggaagctaaccttcgaacagcagcgttctgatttgtgggaaagattgtatgttgaggcaaaagatcaaaatggaaaacaaggaacagatggaaaaaagaaagggggcagaggaagccacagggctaaaaataagtcaaaggaaacatttttgggttcagttaaggaaacatttgatgccatgaagaattctaccaaggagtttgtaaggcatcataaagagaaaattaagcaggctaaagaagctgtgaaggaaaatctgaaaaaattctcagattcagttaaatccactttcagacactttaaagataccaccaagaatatctttgatgaaaagggtaataaaagatttggtgctacaaaagaagcagctgaaaaaccaagaacagtttttagtgactatttacatccacagtataaggcacctacagaaaaccatcataatagaggccctactatgcaaaatgatggaaggaaagaaaagccagttcactttaaagaattcagaaaaaatacaaattcaaagaaatgcagtcctgggcatgattgtagagaaaattctcattctttcagaaaggcttgttctggtgtatttgattgtgctcaacaagagtccatgagcctttttaacacagtggtgaatcctataaggatggatgaatttagacagataattcaaaggtacatgttaaaagaactggatactttttgtcactggaacgaacttgatcagttcatcaataagtttttcctaaacggtgtctttatacatgatcagaagctcttcactgactttgttaatgatgttaaagattatcttaggaaacatgaaggaatatgaagtagataatgatggagtatttgagaagttggatgaatatatatatagacacttctttggtcacactttttcccctccatatggacccaggtcggtttacataaaaccgtgtcattacagtagtttgtaacatttgtagatnggatagcatttttatgatttgatgagtttcttgtaaggttaccgtttctaagagttgtgctttatggccactgagagaattcagaataaattgaaagatggagtctaaaaattattagctgttacaaatggaacaatttcattataacgtgatcactttgacttgagcaaatggtttaatttttatcttaaaaatcagttaagaatatataaaatcctacctttggccaagtttgtttcttttcattatagtttatatgaaaagatcaccttaagtgaaattattttccttatttncctttaatcttttatgtatttattcacttttggaagctaggaatgagcaacacaaattttactctgaagtcagaagagctcatatataataattctaatgtcccacctattttcacttgtccattccatgtaccagcttagttatgatacttagtcacataattatctttgataaaggtagaggcacaaagaggcaaactaagcaagtcaaattctaatgtgtgtacttcataataattttttatccattttcatcttntttntnnntatattctgtaacatgaaacttacctaatcttcaaatgttagcttcattttttacctttgaaatacttaatctttctgaataaatataatgtgtctataaaataaaaaaaanaaaaaaaaannnnnnagttattaagctggtatctagtcctataatgaacaaaggtgaagctgccttgaggagacaagtgaaaaatttttgcttcaaaggagctcacaagctaagtaaataaatgaaattaaggtatggggcatggtggcctcaggctgtctggaggtgtttggaaaggcttcttgagtgaggtggcctttgaactgaacttagtttttaaagtagcttttggaagagaaatgaggatttgctatgcagacagggaagggaatttcacttaaaaggaaggtcatttggagatgtgaagatacactgctttaaggaagcagggtagagctggaggataagagatgcagaccatgaagggccccattttatgctaaaggttttgtcctgtaggacatggagaacttctgaagaattttcaaggcgggtgggataagattatattgtattttagattacagtagtccccccttatcttcaggatatatgttccaagacccccagtggatgctggaaaccagggatagaacataattctatatatactatgcatgaatttctttttccttctttacaatctcacacataggtttgttcttactatagatcttaccaatctcagcatacttttatttctcttgagaaccttcaccctttcacttaaaggaggcgctttatagcttctctttggcatatccaaatgccagcatcactgttgtattttggggtcattattaagttacttaatcatccttaatccttatcttagggatacttgaacacaaacactggtaggataacagtatatctgattaacagactgctactaggtgattaatgggtgggtagtgtaaatacacaagaaaaggatgattcacatcccatgtgggatggagcagaactgcattatttcattacattactcagaacaggcatataattgaaaacttatgaattattattttttaattatttgagatggaatcttgctttgtcagccaggctggagtgcagtgacacgatctcagctcactgcaacctctgtctcctgggttcaggtgattctcctccctagtctcccaagtagctgggactataggcacgtgccaccacacccggctaattttcatatttttagtagagatggggtttcaccatgttggccaggctgttcttgaaatcctgncctcaagtgatccacacatgtctacctcccaaagtgctgggattacagtcgtgagccactgtaccccgcctaaaactgatgaattatttctgaaattttctatttaacattttcagaccacagttgaccacaggtaacggaaacctcaatcacagaaagtaaagccgtggatacggtgggactaatgtattggtagcagcctagaggattgatgggaaaggtatgaagctagaaggtggtcaatataatacagacatgagctgatgaacatctaaactgggactatactagtaggagaggaaaggaaaaaacattnggaaaatagtaacattgatatttcttgtgaaggagaagtagaaagtaacagtgacttctagatttctgggtngggtcatctgtngttggatagtagtaccactgagatagggaattcaaggttnggggcangggtaatnnggagatgagaatngtgttnggaggtaactactgacattcaagtggagagggttagttggncagtnagtnctatggtcatctcttttgccgagactgntatattnatcagacnnctgggagaacaccaacatccatggggttgtagggaaggctaaggacaagagtggggagtggtaccttgaaaatccaaaagccatctcaagtaaaaggaataaantgtgtcatgctttttaaaaagttgatgtgcggaaaatgttttcttggcttggaaactgggcggcnaggggatgacagtatggacttccagtgaagtagtgacggaagcctgatcatagacattaaggaaagcggtgtaggtgttgtgagcttttgctgtaagaaaaagttgagacttttgttttgctttgtttgtgagagatgtgtatgtatttctgctgagtgataaagccagcggggagggactgatttttataggaaaggaggaaaaataatggaaacacatctcattattttattgtcacatttcttttctttgttatcttttgagtgtttcccttttttgccagtagagttattgtctattttttctttctataggacaaaaaaactaatacagactcctttatttttatatggatatactaggattgtaattcagatatttaatatcttttatcagtgttcagatcatagattaatggagaaaacatttaaaattgttttaaatttaaatacattgaactctaacatagatgaaaaatgtgtttactgctttcagtcgacctgataaaaagcaacgtatggtaaatattgaaaactccaggcatcgaaaacaagagcagaagcaccttcagccacagccttataaaagggaaggtaaatggcataaatatggtcgcactaatggaagacaaatggcaaatcttgaaatagaattggggcaattaccttttgatcctcaatactgattcacaattgagttaaattagacaactgtaagagaaaaatttatgcttngtataatgttnnggtattgaaactaatgaaattaccaagatgacaatgtcttttctttnngtttctaagtatcagtttgataactttatattattcctcagaagcattagttaaaagtctactaacctgcattttcctgtagtttagcttcgttgaattttttttgacactggaaatgttcaactgtagttttattaaggaagccaggcatgcaacagattttgtgcatgaaatgagacttcctttcagtgtaagagcttaaagcaagctcagtcatacatgacaaagtgtaattaacactgatgtttgtgttaaatttgcagcagagcttgagaaaagtacattgttctggaatttcatcattaacattttataatcttacactcacttcttgtctttttgtgggttcaagagccctctgacttgtgaagaatttgctgccctcttaagagcttgctgacttgttttcttgtgaaattttttgcacatctgaatatcgtggaagaaacaataaaactacaccatgaggaaaannaaangtctttatttaaaatctggcattgnattaacatgnaattttantnctatgtggtntntnatacatttcctcagnagtgatatttggtaaagcagttcatacagcttttttctaagttccatgaatcttacccagtgtttaccgaagtatttaagcagcatctgaatatttccacccagcaatgttaatttatctaggaaagttcagaattcatctcatgttgaattccctttaactccgttcatagacatatagtgactccaatcgaccctngggcaatgagtgtggaagaaaacagcagttctttataatgctgaaataggaaagcgctattcccntccgctgaagtgatcaagtgagtaggcaatgatgcatcatcagaactcctagtaaccagttaagggattangtaaatacactgcttcacagataagacttttccagtcag

SEQ ID NO: 321 - DNA, 2017 bp, Homo sapiens
  misc_feature (59)..(59): n is a, c, g, or t
  misc_feature (116)..(116): n is a, c, g, or t
  misc_feature (1066)..(1099): n is a, c, g, or t
  misc_feature (1117)..(1117): n is a, c, g, or t
  misc_feature (1219)..(1219): n is a, c, g, or t
  misc_feature (1642)..(1642): n is a, c, g, or t
  misc_feature (1753)..(1753): n is a, c, g, or t
  misc_feature (1772)..(1772): n is a, c, g, or t
  misc_feature (1785)..(1785): n is a, c, g, or t
  misc_feature (1864)..(1864): n is a, c, g, or t
  misc_feature (1889)..(1889): n is a, c, g, or t
  misc_feature (1899)..(1899): n is a, c, g, or t
  misc_feature (1922)..(1922): n is a, c, g, or t
  misc_feature (1938)..(1938): n is a, c, g, or t
  misc_feature (1944)..(1944): n is a, c, g, or t
  misc_feature (1957)..(1957): n is a, c, g, or t
ttttttttttttttttttttttttgttggttgtttttataagaggcgtcattggcgccngagctgtgaccgccgccactggggcagccagcacaatcgggcggaggtggcgctgcnccttcagacctgaaagatgtctgaaaattccagtgacagtgattcatcttgtggttggactgtcatcagtcatgaggggtcagatatagaaatgttgaattctgtgacccccactgacagctgtgagcccgccccagaatgttcatctttagagcaagaggagcttcaagcattgcagatagagcaaggagaaagcagccaaaatggcacagtgcttatggaagaaactgcttatccagctttggaggaaaccagctcaacaattgaggcagaggaacaaaagatacccgaagacagtatctatattggaactgccagtgatgattctgatattgttacccttgagccacctaagttagaagaaattggaaatcaagaagttgtcattgttgaagaagcacagagttcagaagactttaacatgggctcttcctctagcagccagtatactttctgtcagccagaaactgtattttcatctcagcctagtgacgatgaatcaagtagtgatgaaaccagtaatcagcccagtcctgcctttagacgacgccgtgctaggaagaagaccgtttctgcttcagaatctgaagaccggctagttgctgaacaagaaactgaaccttctaaggagttgagtaaacgtcagttcagtagtggtctcaataagtgtgttatacttgctttggtgattgcaatcagcatgggatttggccatttctatggcacaattcagattcagaagcgtcaacagttagtcagaaagatacatgaagatgaattgaatgatatgaaggattatctttcccagtgtcaacaggaacaaggatcttttatagattataagtcattgaaagaaaatcttgcaaggtgttggacacttactgaagcagagaagatgtcctttgaaactcagaaaacgaaccttgctacagaaaatcagtatttaagannnnnnnnnnnnnnnnnnnnnnnnnnnnnnnnnnaagctcttcactgacttngttaatgatgttaaagattatcttagaaacatgaaggaatatgaagtagataatgatggagtatttgagaagttggatgaatatatatatagacacttcttnggtcacactttttcccctccatatggacccagtcgacctgataaaaagcaacgtatggtaaatattgaaaactccaggcatcgaaaacaagagcagaagcaccttcagccacagccttataaaagggaaggtaaatggcataaatatggtcgcactaatggaagacaaatggcaaatcttgaaatagaattggggcaattaccttttgatcctcaatactgattcacaattgagttaaattagacaactgtaagagaaaaatttatgctttgtataatgtttggtattgaaactaatgaaattaccaagatgacaatgtcttttcttttgtttctaagtatcagtttgataactttatattattcctcagaagcattagttaaaagtctactaacctgcattttcctgtagtttagcttcgtngaattttttttgacactggaaatgttcaactgtagttttattaaggaagccaggcatgcaacagattttgtgcatgaaatgagacttcctttcagtgtaagagcttaaagnaagctcagtcatacatganaaagtgtaattancactgatgtttgtgttaaatttgcagcagagcttgagaaaagtacattgttctggaatttcatcattaacattttatantcttacactcacttcttgtcttttngtgggttcangagccctctgacttgtgaagaantttgctgccctcttangagctngctgacttgtttncttgtgaaattttttgcacatctgaatatcgtggaagaaacaataaaactacaccatgag

SEQ ID NO: 322 - DNA, 4131 bp, Homo sapiens
tcaagctcgccccgcgcagcccgagccgggctgggcgctgtcctcgggggcctggggaaccgcgcggtttggagatcggaggcacctggaacccgtggcaagcgccgagccgggagacagcccgaggaaccacgggttctggagctaggagccggaagctgggagtccggaggagagcggagcccggagcccggagcccggggcggcgcgtctgggtctggcgcttcccgactggacggcgcgcccgctggtcttcgccacgcgccctcccctgggctcgcgttcatcggtccccgcctgagacgcgcccactcctgcccggacttccagccccggaggcgccggacagagccgcggactccagcgcccaccatgcgcctcaacagctccgcgccgggaaccccgggcacgccggccgccgaccccttccagcgggcgcaggccggactggaggaggcgctgctggccccgggcttcggcaacgcttcgggcaacgcgtcggagcgcgtcctggcggcacccagcagcgagctggacgtgaacaccgacatctactccaaagtgctggtgaccgccgtgtacctggcgctcttcgtggtgggcacggtgggcaacacggtgacggcgttcacgctggcgcggaagaagtcgctgcagagcctgcagagcacggtgcattaccacctgggcagcctggcgctgtccgacctgctcaccctgctgctggccatgcccgtggagctgtacaacttcatctgggtgcaccacccctgggccttcggcgacgccggctgccgcggctactacttcctgcgcgacgcctgcacctacgccacggccctcaacgtggccagcctgagtgtggagcgctacctggccatctgccaccccttcaaggccaagaccctcatgtcccgaagccgcaccaagaagttcatcagcgccatctggctcgcctcggccctgctgacggtgcctatgctgttcaccatgggcgagcagaaccgcagcgccgacggccagcacgccggcggcctggtgtgcacccccaccatccacactgccaccgtcaaggtcgtcatacaggtcaacaccttcatgtccttcatattccccatggtggtcatctcggtcctgaacaccatcatcgccaacaagctgaccgtcatggtacgccaggcggccgagcagggccaagtgtgcacggtcgggggcgagcacagcacattcagcatggccatcgagcctggcagggtccaggccctgcggcacggcgtgcgcgtcctacgtgcagtggtcatcgcctttgtggtctgctggctgccctaccacgtgcggcgcctcatgttctgctacatctcggatgagcagtggactccgttcctctatgacttctaccactacttctacatggtgaccaacgcactcttctacgtcagctccaccatcaaccccatcctgtacaacctcgtctctgccaacttccgccacatcttcctggccacactggcctgcctctgcccggtgtggcggcgcaggaggaagaggccagccttctcgaggaaggccgacagcgtgtccagcaaccacaccctctccagcaatgccacccgcgagacgctgtactaggctgtgcgccccggaacgtgtccaggaggagcctggccatgggtccttgcccccgacagacagagcagcccccacccgggagccttgatgggggtcaggcagaggccagcctgcactggagtctgaggcctgggacccccccctcccaccccctaacccatgtttctcattagtgtctcccgggcctgtccccaactcctccccacccctcccccatctcctctttgaaagccagaacaagagagcgctcctctcccagataggaaaagggcctctaacaaggagaaattagtgtgcggcaaaaggcagttttctttgttctcagactaatggatggttccagagaaggaaatgaaatgtgctgggtggggccgggcctccggcggcccggctgctgttcccatgtccacatctctgaggcctgcaccccctctgtctagctcggggagtccagccccagtcccgcaggctccgtggctttgggcctcacgtgcagaccctgccatgcagacccatgcccccctcccccaggcagctccaagaaagctccctgactcgccccttcaggcctggcaagctgggggcccatcgccgtggggagtccctcccaccaccctcgccgcaggcagctgcagcccccagaggggaccacaagcccaaaaaggacaaaaatgggctggcctggaatggcccagaccccagcctcccctcctccctcccatcctcacccaggccaaggcccaggggctctgccaggacaccacatgggagggggctcaggcctcagcctcaagatcttcagctgtggcctctcgggctcggcagaagggacgccggatcaggggcctggtctccagcacctgcccgagtggccgtggccaggatggggtgcgcattccgtgtgctttgcttgtagctgtgcaggctgaggtctggagccaggcccagagctggcttcagggtggggccttgagaaggggaatgtgggacaggggcgatggtgcctggtctctgagtaagatgccaggtcccaggaactcaggcttcaggtgagaaggagcggtgtgtccaggcaccgctggccggcagccctgggctgaggcacagactcatttgtcaccttctggcggcggcagccctggccccggcctccaagcagttgaaaaagctggcgcctccttggtctctaggatccaggctccacagagcacatgactagccaggcccctggcttaagaaggtcgcctaagcctaagagaagacagtcccaggagaagctggccgggaccagccaggagctgggagccacaggaagcaaaagtcagccttttcttcaagggatttccctgtctcagagcagcctttgccccagggaaatgggctctgggctggctgcctgcaccggccatgtcgacccaggacccggacacctggtcttgggctgtgttcagccactttgccttctctggactcagtttccccgtctgagaaatgagagtcgaatgctacagtatctgcagtcgcttggatctggctgttgagttgacgggttccttgaaccccacaaaatccctctccaaccacaggacccttcggctcaccaagaacggggcccaggggagtcaggcctattcgctgcacttcctgccaaactttgcccccacaagcctggtcatcagccaggcagccctcccagtgcccaagggccaccaaccccagggaaacagggccagcacagaggggccttcctcccccacagagctcccatgacatagtctgctctgggcggaagagctttgctgccagccagggatgtccagaggtcggtgcagcccctatccctgctcaggagtgggctcagagtctagcaaatgctaaggcccctcaggctgggctctgaacgaggacctggactcagagccagacagggcagcctcagacccttctctggggctcctggaccttgggccataatttctgagcctcggtttccccatctaaggaacagatgtggtcgttccgccctctcagctggatgagactgtcctggaggatccaccccggaacagacagaacggtgtctctcaggatggtgctctgagagagggcagagtggatgccccactgccctagaccctcggtagacgtggggtctctggggcggggtctgtggctgtgactgaagtcggctttcccgttgatgtcttgatgctcctatctgtgcacttaccgtaggtagggacacgtgtccatgcaccacagacacacccacgacacctgatctcgtatcactagcttgcggccaggtcatgatgtggccccggaagctggccctgcgtgccatgagtgcgtcggtcatggagtccggagcccctgagccggcccctggtgacggcacagccctcacagctcaaacgcccacccccactcccaccatctgcaggtggtgaaaacaaaccccgtgtatctctcaataaaggtggccgaagggcctcgatgtgg

SEQ ID NO: 323 - DNA, 1511 bp, Homo sapiens
ggtcagctccaaaacaatccggaacggccagctccgggggagcacgactgggcgagaggcacagaaatggacaccagaaataaggcccagctccttgtgctcctgactcttctcagtgtgctcttctcacagacttcggcatggcctctttacagggcaccttctgctctcaggttgggtgacagaataccctttgagggagcaaatgaacctgatcaagtttcattaaaagaagacattgacatgttgcaaaatgcattagctgaaaatgacacaccctattatgatgtatccagaaatgccaggcatgctgatggagttttcaccagtgacttcagtaaactcttgggtcaactttctgccaaaaagtaccttgagtctcttatgggaaaacgtgttagcagtaacatctcagaagaccctgtaccagtcaaacgtcactcagatgcagtcttcactgacaactatacccgccttagaaaacaaatggctgtaaagaaatatttgaactcaattctgaatggaaagaggagcagtgagggagaatctcccgactttccagaagagttagaaaaatgatgaaaaagacctttggagcaaagctgatgacaacttcccagtgaattcttgaaggaaaatgatacgcaacataattaaattttagattctacataagtaattcaagaaaacaacttcaatatccaaaccaaataaaaatattgtgttgtgaatgttgtgatgtattctagctaatgtaataactgtgaagtttacattgtaaatagtatttgagagttctaaattttgtctttaactcataaaaagcctgcaatttcatatgctgtatatcctttctaacaaaaaaatatattttaatgataagtaatgctaggttaatccaattatatgagacgtttttggaagagtagtaatagagcaaaattgatgtgtttatttatagagtgtacttaactattcaggagagtagaacagataatcagtgtgtctaaatttgaatgttaagcagatggaatgctgtgttaaataaacctcaaaatgtctaagatagtaacaatgaagataaaaagacattcttccaaaaagattttcagaaaatattatgtgtttccatattttataggcaacctttatttttaatggtgttttaaaaaatctcaaatttggattgctaatcaccaaaggctctctcctgatagtctttcagttaaggagaacgacccctgcttctgacactgaaacttccctttctgcttgtgttaagtatgtgtaaaatgtgaagtgaatgaaacactcagttgttcaataataaatatttttgccataatgactcagaatattgctttggtcatatgagcttccttctgtgaaatacattttggagacacaactatttttccaaaataattttaagaaatcaaagagagaaaataaagaccttgcttatgattgcagataaaaaaaaaaaaaaaaaaaaaaaaaaaaaaaaaaaa

SEQ ID NO: 324 - DNA, 1512 bp, Homo sapiens
cggccgcgttctgtggttttccgctattcccccagacccgcaccttctcggcctctttgcggagaatcgtgaccaagatgtggaacagtggattcgaaagctatggcagctcctcatacgggggagccggcggctacacgcagtccccggggggctttggatcgcccgcaccttctcaagccgaaaagaaatcaagagcccgagcccagcacattgtgccctgtactatatctcagctgctttctgccactttggttgatgaagtgttcagaattgggaatgttgagatttcacaggtcactattgtggggatcatcagacatgcagagaaggctccaaccaacattgtttacaaaatagatgacatgacagctgcacccatggacgttcgccagtgggttgacacagatgacaccagcagtgaaaacactgtggttcctccagaaacatatgtgaaagtggcaggccacctgagatcttttcagaacaaaaagagcctggtagcctttaagatcatgcccctggaggatatgaatgagttcaccacacatattctggaagtgatcaatgcacacatggtactaagcaaagccaacagccagccctcagcagggagagcacctatcagcaatccaggaatgagtgaagcagggaactttggtgggaatagcttcatgccagcaaatggcctcactgtggcccaaaaccaggtgttgaatttgattaaggcttgtccaagacctgaagggttgaactttcaggatctcaagaaccagctgaaacacatgtctgtatcctcaatcaagcaagctgtggattttctgagcaatgaggggcacatctattctactgtggatgatgaccattttaaatccacagatgcagaataactggatctaactgggtacctgagatattttacagctggacctagtttcacaatctgttgtctccagctctgcatatgtctggccagggggcttctaggaagtaggtttcatctatcaaatgtctcctctgacttccttttgaaacttactgctcttctgttttattttgttttgtttgaagctcagagggagatgggcaattgacagggatgcaatccagggtgggatttcttgaggaagttacaaataagcttgttacaacatcaagatagatggaattggaaggatgctaccaggagagtacttacatagtgctcaggagtttctcttcttaaaatgtttactgctgaaagatgagcaggaccagggcgttataggcagagccctagccagaaacctgctggcctctgcctgttttcatttcccactttggttgtgtggcattactttcagaattgcactttcctgcttgtcatgactttttgacacacttgccatgacgtgtgtttctgtgaacatgaagttctgcggtagtgcctccaggggcagaggaaaagaagaagtgttactgcattttgtacaaaataaatacagtcatatgtttaataaaacagttctaccg

SEQ ID NO: 325 - DNA, 1953 bp, Homo sapiens
cgctcccacccgcccgtggcccgcgcccatggccgcgcgcgctccacacaactcaccggagtccgcgccctgcgccgccgaccagttcgcagctccgcgccacggcagccagtctcacctggcggcaccgcccgcccaccgccccggccacagcccctgcgcccacggcagcaatcgaggcgaccgcgacagtggtgggggacgctgctgagtggaagagagcgcagcccggccaccggacctacttactcgccttgctgattgtctatttttgcgtttacaacttttctaagaacttttgtatacaaaggaactttttaaaaaagacgcttccaagttatatttaatccaaagaagaaggatctcggccaatttggggttttgggttttggcttcgttttttctcttcgttgactttggggttcaggtgccccagctgcttcgggctgccgaggaccttctgggcccccacattaatgaggcagccacctggcgagtctgacatggctgtcagcgacgcgctgctcccatctttctccacgttcgcgtctggcccggcgggaagggagaagacactgcgtcaagcaggtgccccgaataaccgctggcgggaggagctctcccacatgaagcgacttcccccagtgcttcccggccgcccctatgacctggcggcggcgaccgtggccacagacctggagagcggcggagccggtgcggcttgcggcggtagcaacctggcgcccctacctcggagagagaccgaggagttcaacgatctcctggacctggactttattctctccaattcgctgacccatcctccggagtcagtggccgccaccgtgtcctcgtcagcgtcagcctcctcttcgtcgtcgccgtcgagcagcggccctgccagcgcgccctccacctgcagcttcacctatccgatccgggccgggaacgacccgggcgtggcgccgggcggcacgggcggaggcctcctctatggcagggagtccgctccccctccgacggctcccttcaacctggcggacatcaacgacgtgagcccctcgggcggcttcgtggccgagctcctgcggccagaattggacccggtgtacattccgccgcagcagccgcagccgccaggtggcgggctgatgggcaagttcgtgctgaaggcgtcgctgagcgcccctggcagcgagtacggcagcccgtcggtcatcagcgtcagcaaaggcagccctgacggcagccacccggtggtggtggcgccctacaacggcgggccgccgcgcacgtgccccaagatcaagcaggaggcggtctcttcgtgcacccacttgggcgctggaccccctctcagcaatggccaccggccggctgcacacaacttccccctggggcggcagctccccagcaggagtaccccgaccctgggttttgaggaagtgctgagcagcagggaatgtcaccctgccctgccgcttcctcccggcttccatccccacccggggcccaattacccatccttcctgcccgatcagatgcagccgcaagtcccgccgctccattaccaagagctcatgccacccggttcctgcatgccagaggagcccaagccaaagaggggaagacgatcgtggccccggaaaaggaccgccacccacacttgtgattacgcgggctgcggcaaaacctacacaaagagttcccatctcaaggcacacctgcgaacccacacaggtgagaaaccttaccactgtgactgggacggctgtggatggaaattcgcccgctcagatgaactgaccaggcactaccgtaaacacacggggcaccgcccgttccagtgccaaaaatgcgaccgagcattttccaggtcggaccacctcgccttacacatgaagaggcatttttaaatcccagacagtggatatgacccacactgccagaaga

SEQ ID NO: 326 - DNA, 2140 bp, Homo sapiens
ggcacgaggggcgactggggctcagcgcagcgaagcccgatgtggtccggaggcagtgggaaggcgcggggctgggaggccgcggcgggagggaggagcagccccggcaggctcagccgccgccgaatcatgtcgatgagtccaaagcacacgactccgttctcagtgtctgacatcttgagtcccctggaggaaagctacaagaaagtgggcatggagggcggcggcctcggggctccgctggcggcgtacaggcagggccaggcggcaccgccaacagcggccatgcagcagcacgccgtggggcaccacggcgccgtcaccgccgcctaccacatgacggcggcgggggtgccccagctctcgcactccgccgtggggggctactgcaacggcaacctgggcaacatgagcgagctgccgccgtaccaggacaccatgaggaacagcgcctctggccccggatggtacggcgccaacccagacccgcgcttccccgccatctcccgcttcatgggcccggcgagcggcatgaacatgagcggcatgggcggcctgggctcgctgggggacgtgagcaagaacatggccccgctgccaagcgcgccgcgcaggaagcgccgggtgctcttctcgcaggcgcaggtgtacgagctggagcgacgcttcaagcaacagaagtacctgtcggcgccggagcgcgagcacctggccagcatgatccacctgacgcccacgcaggtcaagatctggttccagaaccaccgctacaaaatgaagcgccaggccaaggacaaggcggcgcagcagcaactgcagcaggacagcggcggcggcgggggcggcgggggcaccgggtgcccgcagcagcaacaggctcagcagcagtcgccgcgacgcgtggcggtgccggtcctggtgaaagacggcaaaccgtgccaggcgggtgcccccgcgccgggcgccgccagcctacaaggccacgcgcagcagcaggcgcagcaccaggcgcaggccgcgcaggcggcggcagcggccatctccgtgggcagcggtggcgccggccttggcgcacacccgggccaccagccaggcagcgcaggccagtctccggacctggcgcaccacgccgccagccccgcggcgctgcagggccaggtatccagcctgtcccacctgaactcctcgggctcggactacggcaccatgtcctgctccaccttgctatacggtcggacctggtgagaggacgccgggccggccctagcccagcgctctgcctcaccgcttccctcctgcccgccacacagaccaccatccaccgctgctccacgcgcttcgacttttcttaacaacctggccgcgtttagaccaaggaacaaaaaaaccacaaaggccaaactgctggacgtctttctttttttccccccctaaaatttgtgggttttttttttaaaaaaaagaaaatgaaaaacaaccaagcgcatccaatctcaaggaatctttaagcagagaagggcataaaacagctttggggtgtctttttttggtgattcaaatgggttttccacgctagggcggggcacagattggagagggctctgtgctgacatggctctggactctaaagaccaaacttcactctgggcacactctgccagcaaagaggactcgcttgtaaataccaggatttttttttttttttgaagggaggacgggagctggggagaggaaagagtcttcaacataacccacttgtcactgacacaaaggaagtgccccctccccggcaccctctggccgcctaggctcagcggcgaccgccctccgcgaaaatagtttgtttaatgtgaacttgtagctgtaaaacgctgtcaaaagttggactaaatgcctagtttttagtaatctgtacattttgttgtaaaaagaaaaaccactcccagtccccagcccttcacattttttatgggcattgacaaatctgtgtatattatttggcagtttggtatttgcggcgtcagtctttttctgttgtaacttatgtagatatttggcttaaatatagttcctaagaagcttctaataaattatacaaattaaaaagattctttttctgattaaaaaaaaaaaaaaaaaa

SEQ ID NO: 327 - DNA, 539 bp, Homo sapiens
ctgtctcccgccacccacaccagctgtcccactcaccatggagaagatcctgatcctcctgcttgtcgccctctctgtggcctatgcagctcctggcccccgggggatcattatcaacctggagaacggtgagctctgcatgaatagtgcccagtgtaagagcaattgctgccagcattcaagtgcgctgggcctggcccgctgcacatccatggccagcgagaacagcgagtgctctgtcaagacgctctatgggatttactacaagtgtccctgtgagcgtggcctgacctgtgagggagacaagaccatcgtgggctccatcaccaacaccaactttggcatctgccatgacgctggacgctccaagcagtgagactgcccacccactcccacacctagcccagaatgctgtaggccactaggcgcaggggcatctctcccctgctccagcgcatctcccgggctggccacctccttgaccagcatatctgttttctgattgcgctcttcacaattaaaggcctcctgcaaacctt

SEQ ID NO: 328 - DNA, 1558 bp, Homo sapiens
  misc_feature (451)..(451): n is a, c, g, or t
  misc_feature (631)..(631): n is a, c, g, or t
  misc_feature (637)..(641): n is a, c, g, or t
  misc_feature (742)..(742): n is a, c, g, or t
  misc_feature (843)..(843): n is a, c, g, or t
  misc_feature (970)..(970): n is a, c, g, or t
  misc_feature (1216)..(1216): n is a, c, g, or t
  misc_feature (1421)..(1421): n is a, c, g, or t
  misc_feature (1453)..(1453): n is a, c, g, or t
  misc_feature (1486)..(1486): n is a, c, g, or t
gccagtgggtctccattgcccagctcctgcccacactcctgcctgttgcggtgaccagagtcgtcatgtctcttgagcagaagagtcagcactgcaagcctgaggaaggccttgacacccaagaagaggccctgggcctggtgggtgtgcaggctgccactactgaggagcaggaggctgtgtcctcctcctctcctctggtcccaggcaccctgggggaggtgcctgctgctgggtcaccaggtcctctcaagagtcctcagggagcctccgccatccccactgccatcgatttcactctatggaggcaatccattaagggctccagcaaccaagaagaggaggggccaagcacctcccctgacccagagtctgtgttccgagcagcactcagtaagaaggtggctgacttgattcattttctgctcctcaagtattaagtcaaggagcnggtcacaaaggcagaaatgctggagagcgtcatcaaaaattacaagcgctgctttcctgagatcttcggcaaagcctccgagtccttgcagctggtctttggcattgacgtgaaggaagcggaccccaccagcaacacctacacccttgtcacctgcctgggactcctatgatggcctgntggttnnnnntaatcagatcatgcccaagacgggcctcctgataatcgtcttgggcatgattgcaatggagggcaaatgcgtccctgaggagaaaatctgggaggagctgngtgtgatgaaggtgtatgttgggagggagcacagtgtctgtggggagcccaggaagctgctcacccaagatttggtgcaggaaaactacctggagtaccgncaggtgcccagcagtgatcccatatgctatgagttactgtggggtccaagggcactcgctgcttgaaagtactggagcacgtggtcagggtcaatgcaagagttctcatttcctacccatccctgcntgaagcagctttgagagaggaggaagagggagtctgagcatgagctgcagccagggccactgcgaggggggctgggccagtgcaccttccagggctccgtccagtagtttcccctgccttaatgtgacatgaggcccattcttctctctttgaagagagcagtcaacattcttagtagtgggtttctgttctattggatgactttgagatttgtctttgtttccttttggaattgttcaaatgttncttttaatgggtggttgaatgaacttcagcattcaaatttatgaatgacagtagtcacacatagtgctgtttatatagtttaggagtaagagtcttgttttttattcagattgggaaatccattccattttgtgaattgggacatagttacagcagtggaataagtattcatttagaaatgtgaatgagcagtaaaactgatganataaagaaattaaaagatatttaattcttgcnttatactcagtctattcggtaaaattttttttnaaaaatgtgcatacctggatttccttggcttctttgagaatgtaagacaaattaaatctgaataaatcatta

SEQ ID NO: 329 - DNA, 1283 bp, Homo sapiens
tttcgcagccgctgccgcctcgccgctgctccttcgtaaggccacttccgcacaccgacaccaacatgaacggacagctcaacggcttccacgaggcgttcatcgaggagggcacattccttttcacctcagagtcggtcggggaaggccacccagataagatttgtgaccaaatcagtgatgctgtccttgatgcccaccttcagcaggatcctgatgccaaagtagcttgtgaaactgttgctaaaactggaatgatccttcttgctggggaaattacatccagagctgctgttgactaccagaaagtggttcgtgaagctgttaaacacattggatatgatgattcttccaaaggttttgactacaagacttgtaacgtgctggtagccttggagcaacagtcaccagatattgctcaaggtgttcatcttgacagaaatgaagaagacattggtgctggagaccagggcttaatgtttggctatgccactgatgaaactgaggagtgtatgcctttaaccattgtcttggcacacaagctaaatgccaaactggcagaactacgccgtaatggcactttgccttggttacgccctgattctaaaactcaagttactgtgcagtatatgcaggatcgaggtgctgtgcttcccatcagagtccacacaattgttatatctgttcagcatgatgaagaggtttgtcttgatgaaatgagggatgccctaaaggagaaagtcatcaaagcagttgtgcctgcgaaataccttgatgaggatacaatctaccacctacagccaagtggcagatttgttattggtgggcctcagggtgatgctggtttgactggacggaaaatcattgtggacacttatggcggttggggtgctcatggaggaggtgccttttcaggaaaggattataccaaggtcgaccgttcagctgcttatgctgctcgttgggtggcaaaatcccttgttaaaggaggtctgtgccggagggttcttgttcaggtctcttatgctattggagtttctcatccattatctatctccattttccattatggtacctctcagaagagtgagagagagctattagagattgtgaagaagaatttcgatctccgccctggggtcattgtcagggatctggatctgaagaagccaatttatcagaggactgcagcctatggccactttggtagggacagcttcccatgggaagtgcccaaaaagcttaaatattgaaagtgttagccttttttccccagacttgtt

SEQ ID NO: 330 - DNA, 1128 bp, Homo sapiens
  misc_feature (47)..(47): n is a, c, g, or t
  misc_feature (54)..(54): n is a, c, g, or t
  misc_feature (58)..(58): n is a, c, g, or t
  misc_feature (62)..(64): n is a, c, g, or t
  misc_feature (221)..(221): n is a, c, g, or t
  misc_feature (231)..(231): n is a, c, g, or t
  misc_feature (244)..(244): n is a, c, g, or t
  misc_feature (248)..(248): n is a, c, g, or t
  misc_feature (489)..(489): n is a, c, g, or t
  misc_feature (768)..(768): n is a, c, g, or t
  misc_feature (1049)..(1051): n is a, c, g, or t
  misc_feature (1055)..(1059): n is a, c, g, or t
  misc_feature (1104)..(1104): n is a, c, g, or t
cggcacgaggccttctgcagctgcgcgcggcaaagctgtggcctggncgtggcntccntgcnnnatgcaacagttggtggacagaccgtacctggcacacggcgccttgtgcactttccaacattttgatgctaaccgtcgctagtcactgagccctgacatttgatctctggccttgaccgcagatttcggaaacttctggcagcccagtgtctactggnaaggcccaangccgcttgccagnaaanctgcgccccgcccaaaagcactgggttctgcagtccaggcccttcctcagctcccaggtccaggagaactgcaaggtcacctacttccacaggaagcactgggtccgcatccggcccctccgcaccactcctcccagctgggactacacccgcatctgcatccagagagagatggtccccgcccgcatccgcgtcctgagagagatggtccccgaggcctggaggtgctttcccaacaggntgccgctgctgagcaacatcaggcctgatttctccaaggctcccctggcctacgtgaagcggtggctttggaccgcccgccacccccacagcctgtccgcagcctggtgaccgtgaaaatcgccccgccagagagcagaggaagcccgacgcccaggccatctgccttcaggtctgtgatgagaaacggagtggcctgttccgttgtgcccaggtctaggccgctgagcagagccctcactcccaggcagagttgtctgaatccttcctggcggccgcntgctgccctgacgcctcaggcttgcctgcacctggaaggagcttcgccaggtgggccatgagcctctgagcacacccagcctgctgcccggctccaagagtcaggcccctgccaccacctcctgagcctccagccctcagcaccttcaccctactgaccgcggttctacccccacaccagccaccggccccaccggggcacttcccactgctccagccgaccactcagcgagccccaggcccacctctcctctcccttaaagcccttcccttgcccttgcnnnttcnnnnntgccttctccctggggacaggaggcatgcttctccccagtttccncaataaaatatttgttgttaataa

SEQ ID NO: 331 - DNA, 2755 bp, Homo sapiens
cagggccaagcgaggggatcgcgccagcaaccccagtctccccagagaggggccggccgacgctggagcggagcctgacgccaggcgccgcggagcgtgagtagggggcgcgggagccggtcagctggggcgcagcatgccctctgctcccgcgccatggagatcgccctggtgcccctggagaacggcggtgccatgaccgtcagaggaggcgatgaggcccgggcaggctgcggccaggccacagggggagagctccagtgtcccccgacggctgggctcagcgatgggcccaaggagccggcgccaaaggggcgcggcgcgcagagagacgcggactcgggagtgcggcccttgcctccgctgccggacccgggagtgcggcccttgcctccgctgccagaggagctgccacggcctcgacggccgcctcccgaggacgaggaggaagaaggcgatcccggcctgggcacggtggaggaccaggctctgggcacggcgtccctgcaccaccagcgcgtccacatcaacatctccgggctgcgctttgagacgcagctgggcaccctggcgcagttccccaacacactcctgggggaccccgccaagcgcctgcgctacttcgaccccctgaggaacgagtacttcttcgaccgcaaccggcccagcttcgacggtatcctctactactaccagtccgggggccgcctgcggaggccggtcaacgtctccctggacgtgttcgcggacgagatacgcttctaccagctgggggacgaggccatggagcgcttccgcgaggatgagggcttcattaaagaagaggagaagcccctgccccgcaacgagttccagcgccaggtgtggcttatcttcgagtatccggagagctctgggtccgcgcgggccatcgccatcgtctcggtcttggttatcctcatctccatcatcaccttctgcttggagaccctgcctgagttcagggatgaacgtgagctcgtccgccaccctccggcgccccaccagcctcccgcgcccgcccctggggccaacggcagcggggtcatggccccgccctctggccctacggtggcaccgctcctgcccaggaccctggccgaccccttcttcatcgtggagaccacgtgcgtcatctggttcaccttcgagctgctcgtgcgcttcttcgcctgccccagcaaggcagggttctcccggaacatcatgaacatcatcgatgtggtggccatcttcccctacttcatcaccctgggcaccgaactggcagagcagcagccagggggcggaggaggcggccagaatgggcagcaggccatgtccctggccatcctccgagtcatccgcctggtccgggtgttccgcatcttcaagctctcccgccactccaaggggctgcagatcctgggcaagaccttgcaggcctccatgagggagctggggctgctcatcttcttcctcttcatcggggtcatcctcttctccagtgccgtctacttcgcagaggctgacaaccagggaacccatttctctagcatccctgacgccttctggtgggcagtggtcaccatgaccactgtgggctacggggacatgaggcccatcactgttgggggcaagatcgtgggctcgctgtgtgccatcgccggggtcctcaccattgccctgcctgtgcccgtcatcgtctccaacttcaactacttctaccaccgggaaacggatcacgaggagccggcagtccttaaggaagagcagggcactcagagccaggggccggggctggacagaggagtccagcggaaggtcagcgggagcaggggatccttctgcaaggctggggggaccctggagaatgcagacagtgcccgaaggcagctgccccctagagaagtgtaacgtcaaggccaagagcaacgtggacttgcggaggtccctttatgccctctgcctggacaccagccgggaaacagatttgtgaaaggagattcaggcagactggtggcagtggagtagggaatgggaggcttgctgaacatggatatctacattataccgcagagtatttgaagtcacactgtaacctcagtctacccctctcctttcactcctttcctccctccctcgatccccccattttctctattctttccatgacacccaagggtcgcctatttttaaaaagtaccacattccatgacgcaggagctgtggaaatggtgagcgctgtgagatggatgtatttgtagccagtctcctatacccagcagagggataacccaaacaaaaatgactctaaatagcccagatcccaagagattatgtaactcctccatccagtgttccaaatttgctttacatatgattgtatttgtgtatagggcaaaatattatttttatgcctggtaagtggctttttgtactgtagttcagatagagatattttgggtatattttcaagatacatgttgtatttatggaagaaagagttgtcctgatgtttttctgtgttacttatattagagtcagagatcttggtatgggctgttctgtttcctgtgtctccaagcctctgtcttttctgggatgtggtattggtgctttgtgtctagggcagagtatgttcttgaagaaaggcaaatctgactttttctgtgcgccttaaacaattcttgtaactttcttcaaaaagcattttaatgatattggaggaatacttctgataatttattgtcttccc

SEQ ID NO: 332 - DNA, 2474 bp, Homo sapiens
aagatattaatcacggagttccagggaaaaggaacttgtgaaatgggggagccggctggggttgccggcaccatggagtcaccttttagcccgggactctttcacaggctggatgaagattgggattctgctctctttgctgaacttggttatttcacagacactgatgagctgcaattggaagcagcaaatgagacgtatgaaaacaattttgataatcttgattttgatttggatttgttaccttgggagtcagacatttgggacatcaacaaccaaatctgtacagttaaagatattaaggcagaaccccagccactttctccagcctcctcaagttattcagtctcatctcctcggtcagtggactcttattcttcaactcagcatgttcctgaggagttggatttgtcttctagttctcagatgtctcccctttccttatatggtgaaaactctaatagtctctcttcaccggagccactgaaggaagataagcctgtcactggttctaggaacaagactgaaaatggactgactccaaagaaaaaaattcaggtgaattcaaaaccttcaattcagcccaagcctttattgcttccagcagcacccaagactcaaacaaactccagtgttccagcaaaaaccatcattattcagacagtaccaacgcttatgccattggcaaagcagcaaccaattatcagtttacaacctgcacccactaaaggccagacggttttgctgtctcagcctactgtggtacaacttcaagcacctggagttctgccctctgctcagccagtccttgctgttgctgggggagtcacacagctccctaatcacgtggtgaatgtggtaccagccccttcagcgaatagcccagtgaatggaaaactttccgtgactaaacctgtcctacaaagtaccatgagaaatgtcggttcagatattgctgtgctaaggagacagcaacgtatgataaaaaatcgagaatccgcttgtcagtctcgcaagaagaagaaagaatatatgctagggttagaggcgagattaaaggctgccctctcagaaaacgagcaactgaagaaagaaaatggaacactgaagcggcagctggatgaagttgtgtcagagaaccagaggcttaaagtccctagtccaaagcgaagagttgtctgtgtgatgatagtattggcatttataatactgaactatggacctatgagcatgttggaacaggattccaggagaatgaaccctagtgtgggacctgcaaatcaaaggaggcaccttctaggattttctgctaaagaggcacaggacacatcagatggtattatccagaaaaacagctacagatatgatcattctgtttcaaatgacaaagccctgatggtgctaactgaagaaccattgctttacattcccccacctccttgtcagcccctaattaatacaacagagtctctcaggttaaatcatgaacttcgaggatgggttcatagacatgaagtagaaaggaccaagtctagaagaatgacaaataatcaacagaaaacccgtattcttcagggtgttgtggaacagggctcaaattctcagctgatggctgttcaatacacagaaaccactagtagtatcagcaggaactcagggagtgagctacaagtgtattatgcttcacccagaagttatcaagacttttttgaagccatccgcagaaggggagacacattttatgttgtgtcatttcgaagggatcacctgctgttaccagctaccacccataacaagaccacaagaccaaaaatgtcaattgtgttaccagcaataaacataaatgagaatgtgatcaatgggcaggactacgaagtgatgatgcagattgactgtcaggtgatggacaccaggatcctccatatcaaaagttcgtcggttcctccttacctccgagatcagcagaggaatcaaaccaacaccttctttggctcccctcccgcagccacagaggcaacccacgttgtcagcaccatccctgagtcattacaatagcacccgcagctatgtggaaaactgagcgtgggacccccagactgaagagcaggtgagcaaaatgctgcttttccttggtggcaggcagagaactgttcgtactagaattcaaggagaaaagaagaagaaataaaagaagctgctccatttttcatcatctacccatctatttggaaagcactggaattcagatgcaagagaacaatgtttcttcagtggcaaatgtagccctgcatcctccagtgttacctggtgtagatttttttttctgtacctttctaaacctctcttccctctgtgatggttttgtgtttaaacagtcatcttcttttaaataatatccacctctcctttttgccatttcacttattgattcataaagtgaattttatttaaagctaaaaaaaaaaaaaaaaaaa

SEQ ID NO: 333 - DNA, 661 bp, Homo sapiens
cggccgcggatccattgtggtccgcttctctgcactatgtcgggtggcctcctgaaggcgctgcgcagcgactcctacgtggagctgagccagtaccgggaccagcacttccggggtgacaatgaagaacaagaaaaattactgaagaaaagctgtacgttatatgttggaaatctttctttttacacaactgaagaacaaatctatgaactcttcagcaaaagtggtgacataaagaaaatcattatgggtctggataaaatgaagaaaacagcatgtggattctgttttgtggaatattactcacgcgcagatgcggaaaactccatgcggtacataaatgggacgcgtctggatgaccgaatcattcgcacagactgggacgcaggctttaaggagggcaggcaatacggccgtgggcgatctgggggccaggttcgggatgagtatcggcaggactacgatgctgggagaggaggctatggaaaactggcacagaaccagtgagtggtgagagctctgtcagtgacaaacactcctttggcctgttgaatttgctgaagaacatcacctaaagtctgcacacgagcccatttttaccaagatttgagtcagtgtctttactgagctggaagcctctgaaagttattaaaggcagatc

SEQ ID NO: 334 - DNA, 1960 bp, Homo sapiens
gccaagttatgggtgcgttctgccagcgtcctagcagtgataaagaacaggaaaaagagaaaaaatcagtgatctgtgtcgagggcaatattgcaggtgggaagacgacatgcctggaattcttctccaacgcgacagacgtcgaggtgttaacggagcctgtgtccaagtggagaaatgtccgtggccacaatcctctgggcctgatgtaccacgatgcctctcgctggggtcttacgctacagacttatgtgcagctcaccatgctggacaggcatactcgtcctcaggtgtcatctgtacggttgatggagaggtcgattcacagcgcaagatacatttttgtagaaaacctgtatagaagtgggaagatgccagaagtggactatgtagttctgtcggaatggtttgactggatcttgaggaacatggacgtgtctgttgatttgatagtttaccttcggaccaatcctgagacttgttaccagaggttaaagaagagatgcagggaagaggagaaggtcattccgctggaatacctggaagcaattcaccatctccatgaggagtggctcatcaaaggcagccttttccccatggcagcccctgttctggtgattgaggctgaccaccacatggagaggatgttagaactctttgaacaaaatcgggatcgaatattaactccagagaatcggaagcattgcccataggaggcaaaaggtctatggctcatgtctgaaaaatgcctgctgctgccaagttagctattgggagcaatctggaaaaacttgctcccaggagggctttgtgtctggccagcttgattttcctaatggtctcatctcctttgctagtgtctttgtcatgcgtctctggccctcgtgggtaaatgacaaacgggaccaatgggtttgccaagccctttgctgttcgcagccctcacattcccccggtgcctctcccatggctttgtgctgctgagtcgctctcatgaagcccttaggggagagcacctgttgtgtgcctgacaccacgctggagctgtgtaccaatcgtctcagccttcattaggaggccgaggtaggagtcttatatcccaggtgaggaatttgaagctcagaaaggttgaggggctccccagaggtcacacagcctgtgtgcagtggagctggcaccattcagactttcagccgactcagcaactttcccttgccctgggctgcctcctcctgagagctgttccccaccgccctgcctcttccggttggaggctctcatgtctctttggggagagctggcagtgtgcggagctgataacattttcccaatattgagcagttcccaaggacagtcagcatttctagacttccacaaaattatgctgcatttggctggagcccggtgttcagtggtttccctgcccgaggtcgctgcagccccatctaccacatcttcatgtggacattgagattcacatgctggctcctgaagggtgctcagtctccttggtgattaaggtcctgcttgaactgctgccaactccatgtcagggaagtcgcttttggtgcctggctggtttgcccagagccaagctggggcaaggggcagccagccctggcttccaaggctcccgtactgtctgtgtccttgtataaggagctttgctcttggaattactgaaagtctgtggccctaagagagagacacaagtggccttaagtctttttgaagtgttatttcatccagggaaatgcctcgagccatagagcctgaaatcatctttgttggctcagaaaataccttagcttcactcagctggactgcattgaaggcgaggctgccccttggatcaagcagaaaacaagagaaagaaagaacgttccctttggggatagtctggaaagttgggatttgcaaataaaggctctggaagcattaaaaaaaaaaaaaaaaaaaa

SEQ ID NO: 335 - DNA, 2444 bp, Homo sapiens
tggatagagcgaggagaggtcaaccgtcgtagcgccaataacttctactccatgatccagtcggccaacagccatgtccgcctgcctggtgaacgagaaagctgcccatgagaaagatatggaagaagcaaaggagaagttcaagcaggccctttctggaattctcattcaatttgagcagatagtggctgtgtaccattccgcctccaagcagaaggcatgggaccacttcacaaaagcccagcgaagaacatcagcgtgtggtgcaaacaagctgaggaaattcgcaacattcataatgatgaattaatgggaatcaggcgagaagaagaaatggaaatgtctgatgatgaaatagaagaaatgacagaaacaaaagaaactgaggaatcagccttagtatcacaggcagaagctctgaaggaagaaaatgacagcctccgttggcagctcgatgcctaccggaatgaagtagaactgctcaagcaagaacaaggcaaagtccacagagaagatgaccctaacaaagaacagcagctgaaactcctgcaacaagccctgcaaggaatgcaacagcatctactcaaagtccaagaggaatacaaaaagaaagaagctgaacttgaaaaactcaaagatgacaagttacaggtggaaaaaatgttggaaaatcttaaagaaaaggaaagctgtgcttctaggctgtgtgcctcaaaccaggatagcgaataccctcttgagaagaccatgaacagcagtcctatcaaatctgaacgtgaagcactgctagtggggattatctccacattccttcatgttcacccatttggagcaagcattgaatacatctgttcctacttgcaccgtcttgataataagatctgcaccagcgatgtggagtgtctcatgggtagactccagcataccttcaagcaggaaatgactggagttggagccagcctggaaaagagatggaaattctgtggcttcgagggcttgaagctgacctaaatctctttgcctaacaacttgggactcctgaagataaatatgtgttggacaagcatagaaagtgatttatatttttaatggttttcaagtggaagttcctttgaatttgtcagttcattcctggaaaatcttttgagttaaaataaggatcctaggacagcacctcgaactacaggccctaaagagaaattgcctcaaaccacaagtgctgtaacttcctcccctttctgtcaattggttgtctttaaatattgcaaaagtcctgatgctaaacagtatttggagtgttttcagtgtctgtactactgttgtagaccttggtatttttttaaacactgttaactgaaatgttttgatgatttgtatgtgatttgtgtttctaaacttctctttacattaatgttgttactggtgaaaggcatgagagcagcactaagtcctctgtgtaactgccattgtctttccaatccccagtagaccagtaaataaataacacatcagtgtcttctagaaggtgcctgaccaggttcaccttttaaacgacaaagcatggtttgtggctttttgcaaaattactatgaaccaaaagttgacaaatgttccaaagttattttctctaacatatcacattaaagatctgtttcagaattgtaaaaagtacatctagatgtgtttacagaaagcaagtatccagtatgactggcatgtgttcatgctattcagaatcacttgtaaatagtctgcttttaaaggagggcatgttcagttttctgtgaattaaaatatgctcatgtgtgggcacacacgcacaaacacacacacgcacgcacacagtggcagaaggatttatattaatattctttcccctctggccttcttacagtctgttggtccctttgcttctgttgtcagtgtgttgaattgcaaaccgagtactgctgtaaatactatgtttacttcatgctgaatgtttgcaaagacttgatataagtattaatagtaatgaatcaatgaataaataatgagctagggtttgtgaggctttctacaaataggtcagctccacctggagtgcgaattgccagagacaccttggtagtgcccatcggcaaatcgcaatggcagcatgtgagtggacccattcagaaactttctgcttggtggaaagtaaacagagaggatggaggtttggggcgaatgtcctgaggcagagatggtctttattgtgtgtggtggtggttgtggtatttataataatgcaagcataccctcccttgagtctcaattgaagataaaagaatgtactgagcaagcaaagccaatggagagtatttcacaaaaatactttgtaaatgagatgccagtagtgttcaaagttgtatttttaaaagataaatattcctttttatacctcaaaaaaaaaaaaaaaaaaa

SEQ ID NO: 336 - DNA, 3470 bp, Homo sapiens
  misc_feature (1715)..(1718): n is a, c, g, or t
  misc_feature (1868)..(1868): n is a, c, g, or t
  misc_feature (2118)..(2118): n is a, c, g, or t
  misc_feature (2134)..(2134): n is a, c, g, or t
  misc_feature (2136)..(2138): n is a, c, g, or t
  misc_feature (2140)..(2140): n is a, c, g, or t
  misc_feature (3019)..(3019): n is a, c, g, or t
  misc_feature (3365)..(3368): n is a, c, g, or t
gggccgccgccccggctggggtttgggggaccgagccgctccgggttcgggatgctgaggagaccgcgggcccgcgccagcctcccacacacacacactctcccggcgcctcggccggccgggcgcggtgtgcaggggtgaggcggtgtctccaggctgaggagggacgcggaggagggtccggcgcggccccgggactggagggtgagtccctcacaaagggcggagcggggctgtcacctggagatcacggagggaagttcatccatgagctcggatttcccacattacaacttcaggatgcctaatattggattccagaatctgcctctcaacatatatattgtggtttttggtactgctatatttgtcttcatccttagtttactcttctgttgctacttgattaggctaagacatcaagcacacaaagaattttatgcctacaaacaggttatattaaaagagaaagtaaaagaattgaatttacatgagctctgtgcagtgtgcctagaagacttcaagcctcgagatgagttggggatttgcccatgtaagcacgccttccacagaaagtgccttattaagtggctggaggttcgtaaagtgtgtcccctgtgcaacatgccagttctacagctggcccagttgcacagtaagcaggaccgtggaccccctcaggggccccttcctggggcagagaacattgtatagcttaccgcaaggatcagacctgttgctggacacgacgtctgtgtggagccaggaggaacacatgtggtgtctgtatggctgctctctacctaggacaccagctgccacttcttttgcctcatgaagaactcttgggccagccaaactgggaacctaggtgtctgggtcttgtgacaaccaaagcactttgacactaccccctgccgagagaagaggagtggatgagcctgcgggtttgcctcaagaaacttcatgagggtctcttactaactccattacactctctctcctggagcctcatctccatgtcaagcaggagggtaaagaagggaactaagagcaggtctttcaagccacacccccacctgcggatggatgggtttctctgtaggccatgcaggcctttgtcgcagcaaaccttcccagcagcccttgagccaagtaaaaccagcacaaccagccaccagtggttggtgaggcagtgcccacaaggctcatgttgtatgcctttgataaggccatcttggctttgagtagcagtgttcctcgtcacccatttccccctcaggattacaacacctgctatcaaatcatctaagctgaaaacatgagatgcgcttggaaaggcctagtcagaagccatttcctcttatcatttccctctcctatgcaccagtaaggcccgtccagagccccagcagggagtgggccctgagtccacactgtccctgagtgatccaggaggctgcccacatccccacatgtgcactgtggttccagtgtagctgctgtgagcccactgccactgcctcagaagggagccactgtgaacctctcgagtggctccaaagagcagtggctttttgagaatggcccatacttctggcccggctggatgaagggaatgccgaccctttggcctctccccctccttccatctcttctctctcttgccctatctctctttctacttcagaaaaaaaaaaaaaaaaaaaaaaaannnngtcattcactttttaacactttatcccaaataagatccctgtgtaattctgaagctggtgatccacttggaattgtagatagtttcaggaagctcctgcagggctgtccaccgttggtgtgtgcctcagtatttggacttccgaaactgnaagtgaaagtgtctttataggagagaaacgcatgctgctctttggctctttctgtccaacttttctagaaatgactcaaagtccattaagatttgtgaatattgtataaattagctatggaaagtagcaggtcagatggaaaattcttttccacagccctgctctccgcctccctccatcttaggagcgcctgcctcaattcctcgtcaactgctttgctccactccatcccacaggtgtgagtgggggnaagtttttcattaggnannnantctgcgtgacatggagaatggatggagggagctttgctactctgctcttggcatgactccaggatttttttctggaatccaacctctgtcctcttaggagaaggaacctgtccttggttcagatggctgggcatgaggaggaaaatttccattagtgtagaacagtgctggacagaatccggtttggaaaattacaaatccagttggtcaaaataggccatttcctatgtgtgacctattcgtggtatgccaactggactgcttcctaaacaggacgaggaaagtgaggaatatttttatatgaaagccttagcctgtctggcacccatgaaaaaaactatttatgcactcctactttcaccgtctttttgcattctctatttgtagcacaacagagttgaatgccacaaaacaccccgtttatagtgagctgttttcagtgaccaatatcagaaggaggcttgcttctggactagcctcactaattgccagcagccaccattttccatggaatggccttgggacagatgtcacctctgttatggggctctaataggaaagagaatgttttttcccttcctatgatcaatactgcaaattattgctgctcacagcttttataggattctcccaactgaaagttgcaggctttttctgtccctgtgcatcagtactaacaaaagacagcctcaccaagtctgtatatttgaacagaggcaagttaattcatccccccgtgtcagagccacaggcatgttgagggggttgatacgtagcactggaccagggcgcaaagcccagatagttccagccatgagaggagagcacaagaatgctctgcactctgcactcagcaccaccttgggtctgctttgcccnagatgagggaccactaacaaccttctcagcacatgtgaatgtggactggttttaaaatgcattcattctgctaggattgggctggaagctggaacagtgagagtactttttctgctcctagtcatctccctttctcagcgtgacatcctcctgcagcaagcctagtatcactagcagtagttcctgcgactcttagcaacacaacccgaatatttgctccctgcatctgggtcctccaccaggatgggcctgcgcatctgcattgctgtacagacaaacaggccttttaatttacatcctcctttaattctcattaaaatcgcagggtttttgtttgaaaaaaaannnnttttttatttattttgaaaaaggaatgagttagggaccccgtttataactctacttggctcagacttcgaaccccagtggtagagtcacccttttccggcat

SEQ ID NO: 337 - DNA, 5086 bp, Homo sapiens
  misc_feature (27)..(27): n is a, c, g, or t
  misc_feature (46)..(46): n is a, c, g, or t
agcaccacggcagcaggaggtttcggnctaagttggaggtactggnccacgactgcatgcccgcgcccgccaggtgatacctccgccggtgacccaggggctctgcgacacaaggagtctgcatgtctaagtgctagacatgctcagctttgtggatacgcggactttgttgctgcttgcagtaaccttatgcctagcaacatgccaatctttacaagaggaaactgtaagaaagggcccagccggagatagaggaccacgtggagaaaggggtccaccaggccccccaggcagagatggtgaagatggtcccacaggccctcctggtccacctggtcctcctggcccccctggtctcggtgggaactttgctgctcagtatgatggaaaaggagttggacttggccctggaccaatgggcttaatgggacctagaggcccacctggtgcagctggagccccaggccctcaaggtttccaaggacctgctggtgagcctggtgaacctggtcaaactggtcctgcaggtgctcgtggtccagctggccctcctggcaaggctggtgaagatggtcaccctggaaaacccggacgacctggtgagagaggagttgttggaccacagggtgctcgtggtttccctggaactcctggacttcctggcttcaaaggcattaggggacacaatggtctggatggattgaagggacagcccggtgctcctggtgtgaagggtgaacctggtgcccctggtgaaaatggaactccaggtcaaacaggagcccgtgggcttcctggtgagagaggacgtgttggtgcccctggcccagctggtgcccgtggcagtgatggaagtgtgggtcccgtgggtcctgctggtcccattgggtctgctggccctccaggcttcccaggtgcccctggccccaagggtgaaattggagctgttggtaacgctggtcctgctggtcccgccggtccccgtggtgaagtgggtcttccaggcctctccggccccgttggacctcctggtaatcctggagcaaacggccttactggtgccaagggtgctgctggccttcccggcgttgctggggctcccggcctccctggaccccgcggtattcctggccctgttggtgctgccggtgctactggtgccagaggacttgttggtgagcctggtccagctggctccaaaggagagagcggtaacaagggtgagcccggctctgctgggccccaaggtcctcctggtcccagtggtgaagaaggaaagagaggccctaatggggaagctggatctgccggccctccaggacctcctgggctgagaggtagtcctggttctcgtggtcttcctggagctgatggcagagctggcgtcatgggccctcctggtagtcgtggtgcaagtggccctgctggagtccgaggacctaatggagatgctggtcgccctggggagcctggtctcatgggacccagaggtcttcctggttcccctggaaatatcggccccgctggaaaagaaggtcctgtcggcctccctggcatcgacggcaggcctggcccaattggcccagctggagcaagaggagagcctggcaacattggattccctggacccaaaggccccactggtgatcctggcaaaaacggtgataaaggtcatgctggtcttgctggtgctcggggtgctccaggtcctgatggaaacaatggtgctcagggacctcctggaccacagggtgttcaaggtggaaaaggtgaacagggtcccgctggtcctccaggcttccagggtctgcctggcccctcaggtcccgctggtgaagttggcaaaccaggagaaaggggtctccatggtgagtttggtctccctggtcctgctggtccaagaggggaacgcggtcccccaggtgagagtggtgctgccggtcctactggtcctattggaagccgaggtccttctggacccccagggcctgatggaaacaagggtgaacctggtgtggttggtgctgtgggcactgctggtccatctggtcctagtggactcccaggagagaggggtgctgctggcatacctggaggcaagggagaaaagggtgaacctggtctcagaggtgaaattggtaaccctggcagagatggtgctcgtggtgctcatggtgctgtaggtgcccctggtcctgctggagccacaggtgaccggggcgaagctggggctgctggtcctgctggtcctgctggtcctcggggaagccctggtgaacgtggcgaggtcggtcctgctggccccaacggatttgctggtccggctggtgctgctggtcaaccgggtgctaaaggagaaagaggagccaaagggcctaagggtgaaaacggtgttgttggtcccacaggccccgttggagctgctggcccagctggtccaaatggtccccccggtcctgctggaagtcgtggtgatggaggcccccctggtatgactggtttccctggtgctgctggacggactggtcccccaggaccctctggtatttctggccctcctggtccccctggtcctgctgggaaagaagggcttcgtggtcctcgtggtgaccaaggtccagttggccgaactggagaagtaggtgcagttggtccccctggcttcgctggtgagaagggtccctctggagaggctggtactgctggacctcctggcactccaggtcctcagggtcttcttggtgctcctggtattctgggtctccctggctcgagaggtgaacgtggtctacctggtgttgctggtgctgtgggtgaacctggtcctcttggcattgccggccctcctggggcccgtggtcctcctggtgctgtgggtagtcctggagtcaacggtgctcctggtgaagctggtcgtgatggcaaccctgggaacgatggtcccccaggtcgcgatggtcaacccggacacaagggagagcgcggttaccctggcaatattggtcccgttggtgctgcaggtgcacctggtcctcatggccccgtgggtcctgctggcaaacatggaaaccgtggtgaaactggtccttctggtcctgttggtcctgctggtgctgttggcccaagaggtcctagtggcccacaaggcattcgtggcgataagggagagcccggtgaaaaggggcccagaggtcttcctggcttaaagggacacaatggattgcaaggtctgcctggtatcgctggtcaccatggtgatcaaggtgctcctggctccgtgggtcctgctggtcctaggggccctgctggtccttctggccctgctggaaaagatggtcgcactggacatcctggtacggttggacctgctggcattcgaggccctcagggtcaccaaggccctgctggcccccctggtccccctggccctcctggacctccaggtgtaagcggtggtggttatgactttggttacgatggagacttctacagggctgaccagcctcgctcagcaccttctctcagacccaaggactatgaagttgatgctactctgaagtctctcaacaaccagattgagacccttcttactcctgaaggctctagaaagaacccagctcgcacatgccgtgacttgagactcagccacccagagtggagcagtggttactactggattgaccctaaccaaggatgcactatggatgctatcaaagtatactgtgatttctctactggcgaaacctgtatccgggcccaacctgaaaacatcccagccaagaactggtataggagctccaaggacaagaaacacgtctggctaggagaaactatcaatgctggcagccagtttgaatataatgtagaaggagtgacttccaaggaaatggctacccaacttgccttcatgcgcctgctggccaactatgcctctcagaacatcacctaccactgcaagaacagcattgcatacatggatgaggagactggcaacctgaaaaaggctgtcattctacagggctctaatgatgttgaacttgttgctgagggcaacagcaggttcacttacactgttcttgtagatggctgctctaaaaagacaaatgaatggggaaagacaatcattgaatacaaaacaaataagccatcacgcctgcccttccttgatattgcacctttggacatcggtggtgctgaccatgaattctttgtggacattggcccagtctgtttcaaataaatgaactcaatctaaattaaaaaagaaagaaatttgaaaaaactttctctttgccatttcttcttcttcttttttaactgaaagctgaatccttccatttcttctgcacatctacttgcttaaattgtgggcaaaagagaaaaagaaggattgatcagagcattgtgcaatacagtttcattaactccttcccccgctcccccaaaaatttgaatttttttttcaacactcttacacctgttatggaaaatgtcaacctttgtaagaaaaccaaaataaaaattgaaaaataaaaaccataaacatttgcaccacttgtggcttttgaatatcttccacagagggaagtttaaaacccaaacttccaaaggtttaaactacctcaaaacactttcccatgagtgtgatccacattgttaggtgctgacctagacagagatgaactgaggtccttgttttgttttgttcataatacaaaggtgctaattaatagtatttcagatacttgaagaatgttgatggtgctagaagaatttgagaagaaatactcctgtattgagttgtatcgtgtggtgtattttttaaaaaatttgatttagcattcatattttccatcttattcccaattaaaagtatgcagattatttgcccaaagttgtcctcttcttcagattcagcatttgttctttgccagtctcattttcatcttcttccatggttccacagaagctttgtttcttgggcaagcagaaaaattaaattgtacctattttgtatatgtgagatgtttaaataaattgtgaaaaaaatgaaataaagcatgtttggttttccaaaagaacatat

SEQ ID NO: 338 - DNA, 5907 bp, Homo sapiens
atgcccaacaacctgacggactgcgaggacggcgatgggggagccaacccgggtgatggcaaccccaaggaaagcagtcccttcatcaacagcaccgacacagagaagggaaaggagtatgatggcaagaacatggccttgtttgaggaggagatggacaccagccctatggtgtcctccttgctcagtggcctggccaactacaccaacctgccccagggaagtagggagcatgaagaggcagaaaacaatgagggtggaaaaaagaagccggtgcaggccccacgcatgggcaccttcatgggcgtgtacctgccgtgcctgcagaacatctttggcgtcatcctcttcctgcggctcacctgggtggtgggcattgcaggcatcatggagtccttctgcatggtgttcatctgctgctcctgtacgatgctcacggccatctccatgagtgcaattgcaacgaatggtgttgtgcctgctggtggctcctactacatgatttccaggtctctgggcccagagtttgggggtgccgtgggcctctgcttctacctgggcactacctttgcaggagccatgtacatcctgggcaccatcgaaatcctgctggcttacctcttcccagccatggccatcttcaaggcagaagatgccagtggggaggcagcagccatgctgaacaacatgcgtgtttacggcacctgtgtgctcacctgcatggccactgtggtgtttgtgggtgtcaagtatgtcaacaagtttgcccttgtcttcctgggttgtgtcatcctctccatcctggccatctatgctggggtcatcaagtctgccttcgacccacccaacttcccgatctgcctcctgggtaaccgcacgctgtctcgccatggctttgatgtctgtgccaagctggcttgggaaggaaatgagacggtgaccacacggctatggggccttttctgctcctctcgcttcctcaacgccacctgtgatgaatacttcacccgaaacaatgtcacagagatccagggcatccctggtgctgccagtggcctcatcaaagagaacctctggagctcctacctgaccaagggcgtgattgtggagaggagtgggatgacctcggtgggcctggccgatggcactcctatcgacatggaccacccttatgtcttcagtgatatgacctcctacttcaccctgctggttggcatctacttcccctcagtcacagggatcatggctggttctaaccgctctggggacctgagggatgcccagaagtcaatccccactggcaccatcctggccatcgccaccacctctgctgtctacatcagctccgttgttctgtttggggcctgcattgagggggtcgtcctgcgggacaagtttggcgaagctgtgaatggcaacctcgtggtgggcactctggcctggccatctccatgggtaattgtcatcggatccttcttctccacctgtggggctgggctgcagagcctcacgggggccccacgcctgctgcaggccatctcgagggatggcattgtgcccttcctgcaggtctttggccatggcaaggccaatggagagccgacctgggccctgctcctgactgcctgcatctgcgagattggcatcctcattgcatccctcgacgaggtggcccccatcctctctatgttcttcctgatgtgctacatgtttgtgaatctggcctgtgcagtgcagacgctgctgaggacacccaactggaggccacgctttcgatattaccactggaccctctccttcctgggcatgagcctctgcctggccctcatgttcatctgctcctggtattatgcactggtagccatgctcattgctggactcatctacaagtacattgagtaccgtggggcagagaaggagtggggcgatgggatacgaggtctgtctctcagtgcggctcgctatgccctcttacgcctggaggaagggcccccacacaccaagaactggaggccacagctgctggtgctggtgcgtgtggaccaagaccagaatgtggtgcacccccagctgctctcactgacctcccagctgaaggcagggaagggcctgaccatcgtgggctctgtccttgagggcacctttctggaaaatcatccacaggcccagcgggcagaagagtctatcaggcgcctgatggaggcagagaaggtgaagggcttctgccaggtggtgatctcctccaacttgcgtgatggcgtgtcccatctgatccagtccgggggcctcggggggctgcagcacaacactgtgcttgttggctggccccgcaactggcgccagaaggaagatcatcagacgtggaggaacttcattgagctggtccgggaaaccacagctggccacttagccctgctggtcaccaagaacgtttccatgtttcctgggaaccctgagcgcttctctgagggcagcatcgacgtttggtggattgtgcacgatggaggcatgctcatgctgctgcccttcctgctgcggcaccacaaggtctggcggaagtgcaagatgcgtatcttcactgtggcccagatggatgacaatagcatccagatgaagaaggatctgaccacatttctgtatcatttacgcatcactgcggaggtcgaggtggtggagatgcatgagagcgacatctcagcttacacctatgagaagacgttggtgatggagcagcgttcccagatcctcaaacagatgcatttaaccaagaatgagcgggagcgggagatccagagtatcacagatgagtcacgaggctcaatccggagaaagaatccagccaacacgcggctccgcctgaacgtcccagaagagacggctggtgacagtgaagagaagccagaggaggaggtgcagctgatccacgatcagagtgctcccagctgccccagcagctccccgtccccaggggaggagcctgagggggaaggggagacagatccggagaaggtgcatctcacctggaccaaggacaagtcggtggcagagaagaataagggccccagtcctgtctcctctgagggcatcaaggacttcttcagcatgaagccggagtgggagaacttgaaccagtccaacgtgcggcgcatgcacacggccgtgcggctgaacgaggtcatcgtgaagaaatcccgggacgccaagcttgttttgctcaacatgcctgggcctccccgcaaccgcaatggtgatgaaaactacatggagtttctcgaggtcctcacagagcacctggaccgggtgatgctggtccgcggtggtggccgagaggtcatcaccatctactcctgagaaccaggtcctgccacccgggcccgagcgcgcccggcccgcggctccggagccctcgccgcgccccccgccgctgtcaccgtttacatacagaccctgtgcccgtgtcctggccccttaccccgctgcctgaagcccggaggccacgcctgttggggctgattcggagagggcgccccgccgcgcagagaccagagctcctcagtgccagtttggcccctgggtcttcgctgccctttttctaagcccggcctcgtctcgccggaggagacgctgcaataaaggttgggagaaggcgcggaaaggagaggagctggggccttggggacccccaggtagtccatgcggcccattcctccccttcccactcccgccgcggtcctcgctctgcgctcctccggcgctgctccctggctcccggcggcccggaggcccgcggggtgggaaggccgcgcttgccgtctccgccgccccttctcgccgagccgtggggcgcgggcggccgagcctatacatagtgtacaggagacatcgcgtgtatttttaacgtccccatatttatgtgactagaagcgcaacagacttctcgccatagtcgagctctcccgctgggggcactgcggggaggcgaggcctcgggaagctgaattttccttgacgtccaagagtttgagagcgaaagtgctttaggcccaggcgggggtcgtggcctcgttccctcgacacctccgtcctgctctcgcctcttcgccctttccgcgcgcccttggcttcccaccctcctctccagtccttttccgagatgaggtgagacaagggtccaacttttcctggattcgcctcccagcggacgtgagcttccactgcggctgcagagacgcgagcaacctcttctcatcggctcttatgcaagttggggccaggataggggaggggtgctcctcaagaggaagaaaccgagaggcccgcgccccaccgaggaagccccgccccggtgccttcgctggggagcaggcgtctctcctcagtcggcttgtcgcctgctccccgtatcccatggctcctcgccaaagactgaaattgtggagctggagggcgccccctccccggagtttcctccctgggacaagtgagggaggagggggccgattctggtttaggggccggacccactgagaggccccagagccgcccgtgatgttcctcccccgtccccatctggcagctcctgtctcgcctgagggacccagccgccttctccgtgctctggggccgggcctcgctgcttagcagcggcctctagctccgtctcccggggacctgggcctgagggagggctggagtcagcacgcgctttgtccttagcgcctgtctgctctcctctaactaggacccagggcctttggcttccccagctcatccttggcccttccgctccaccagcctggtctgaggcgtgctctgtccttagagaaggcgcggtggccgggttcccttcccctagggcacattactaagggggtcaggcactgcatgctcgttccagcaccatctgggactgggtacagtacctccagccccagggccctgacctgcgcacctagcttgacatctcacgcacctcccagagctggcgccactgagtaatccggacctcaccacctcttttcctttgagcccaaggcagagctagagctggagctggcgccacccagacagcgtcaggtgtggctggggtaggtttggaggtctgccagttacgccaagtcccctctgagattcgatcaggggactggatagattctttcaggtactcaatcaggaagctggaggtgttagacaccagccccctgcatccttcagtagacctccctctgaacaccacagccaggtcctgccttctgggggcctgaatattccagagctgatgtgatgggctgtgcagaagggggctgtatcaacatcaattagggaaccaaagttgcactatctgggcccagattgtctggttggcaagagcaaagtttccgttgatgaaacagacatcccacaacaaaaacccaagttttctgtgctacatgtgcaatatttgttatgaatgttatcacaagtcattcatcaagttatctttataatcactgtagttagatgtttcatgtccattcaagtgacttttattctgagtgcaatatttcaatagccttgtagtgataactagtgttgcttttgtttagatgatctatgtgcagggcaatgcaatgaagttgaaaccccttggtaataggagaggttgcaaaccaaatcaagagtatttattactattactgctattattattaggcctgcctttaattttcagtgtaagtgttcagtatgccgcatcctgcctcagtattgatcttgtgttctttgtgccaatatgaaaaggagagggttggttctttcctttattgttgaatgctcccatttaatgctttatggcttttactgtattacttttttagactcccgtctgcacaaaatgcaataaaaataattttattataaaaaaaaaaa

SEQ ID NO: 339 - DNA, 1418 bp, Homo sapiens
  misc_feature (104)..(104): n is a, c, g, or t
  misc_feature (207)..(207): n is a, c, g, or t
  misc_feature (304)..(304): n is a, c, g, or t
  misc_feature (314)..(314): n is a, c, g, or t
cagtgaactgcctgctagatgccaggcaagtttaaaggaaaggtcaatgagaaataaagtgctcaagggcagattcaaggaaaacatggggagcattgcagagnaaccaggtcttaaaagagaagttaaggagaacagcaagaagcaagcacacaggagcaggcagaggcacactggttgagaaagtaggatgcccagcagcctggntctgattaaatcagaaattccctctgtaggaggacaagcaaagcatattatcataggctgggcagaattccaaaggtcatttcatccaacactcctncagacgctgnaactcaaggtttcgaaggcaaaagtggaagtgtagacaattgctacagaattgaagcccaacattctgtcctttgcctttcataatttgagacaaaattaaaaccatctgaaatatctcccttggctgcttttttcaaactttaatttccctgcaagtatatgataattgagtttctttagagcacaaggctggatatattggaccttaatgtgcacaagttcatcctagaaattgtctttagagtaccaagtctttcctccccaagagttccaaaactaattcaatatttagaatgctcccctggacctcccagttccagtggctgaatgtcagggctcaggcattagaggattctttttgttctttggccctcttggggactaaatgccatgtatgtcaccatgtcagtgactacagccttggtttcatcccctgatgacccacaaccatcatctcccttatgctgaacatctctctgaatcttggaattttcagatgactctaactttgccaaattagaatcatgcctgattctttttttgtttgattgtttgctttatgtttgtttactttgctcagtgccaagcacaggatttagcataagaaaagttccactagaggttgtttattcaagtaagtaattattatagccatccgtatatgaatgctttacaaaattttggctgatggtcctcgcaggtctgttttattagtcaatttataaactcaagtttatgtcttcaacttgaccatctcctttgacttccagattcgcctcttcccacaaaactgactctccacttggacatctaacaggcatcttaaatttaatgcatccactttggggggctgaggtgggcagatcacgagatcaggagatcaagaccatcctggctggcacggtgaaaccccgtctctgctgaaaatacaaaaaattggccaggcgtggtggcaggcgcctgtggtcccggctactcgggaggctgaggcaggaaaatggcatgaacccaggaggcgtagcttgcagtgagctgagatcgtgccactgcactccagcctgggcgacagagcaagactccttctcaaaaaaaaaaaaaaaaaa

SEQ ID NO: 340 - DNA, 2599 bp, Homo sapiens
aaatccgagcctcgcgtgggctcctggcccccgacggacaccaccaggcccacggagcccaccatgccgcgcccggcccccgcgcgccgcctcccgggactcctcctgctgctctggccgctgctgctgctgccctccgccgcccccgaccccgtggcccgcccgggcttccggaggctggagacccgaggtcccgggggcagccctggacgccgcccctctcctgcggctcccgacggcgcgcccgcttccgggaccagcgagcctggccgcgcccgcggtgcaggtgtttgcaagagcagacccttggacctggtgtttatcattgatagttctcgtagcgtacggcccctggaattcaccaaagtgaaaacttttgtctcccggataatcgacactctggacattgggccagccgacacgcgggtggcagtggtgaactatgctagcactgtgaagatcgagttccaactccaggcctacacagataagcagtccctgaagcaggctgtgggtcgaatcacacccttgtcaacaggcaccatgtcaggcctagccatccagacagcaatggacgaagccttcacagtggaggcaggggctcgagagccctcttctaacatccctaaggtggccatcattgttacagatgggaggccccaggaccaggtgaatgaagtggcggctcgggcccaagcatctggtattgagctctatgctgtgggcgtggaccgggcagacatggcgtccctcaagatgatggccagtgagcccctagaggagcatgttttctacgtggagacctatggggtcattgagaaactttcctctagattccaggaaaccttctgtgcgctggacccctgtgtgcttggaacacaccagtgccagcacgtctgcatcagtgatggggaaggcaagcaccactgtgagtgtagccaaggatacaccttgaatgccgacaagaaaacgtgttcagctcttgataggtgtgctcttaacacccacggatgtgagcacatctgtgtgaatgacagaagtggctcttatcattgtgagtgctatgaaggttataccttgaatgaagacaggaaaacttgttcagctcaagataaatgtgctttgggtacccatgggtgtcagcacatttgtgtgaatgacagaacagggtcccatcattgtgaatgctatgagggctacactctgaatgcagataaaaaaacatgttcagtccgtgacaagtgtgccctaggctctcatggttgccagcacatttgtgtgagtgatggggccgcatcctaccactgtgattgctatcctggctacaccttaaatgaggacaagaaaacatgttcagccactgaggaagcacgaagacttgtttccactgaagatgcttgtggatgtgaagctacactggcattccaggacaaggtcagctcgtatcttcaaagactgaacactaaacttgatgacattttggagaagttgaaaataaatgaatatggacaaatacatcgttaaattgctccaatttctcacctgaaaatgtggacagcttggtgtacttaatactcatgcattcttttgcacacctgttattgccaatgttcctgctaataatttgccattatctgtattaatgcttgaatattactggataaattgtatgaagatcttctgcagaatcagcatgatttttccaaggaaatacatatgcagatacttattaagagcaaactttagtgtctctaagttatgactgtgaaatgattggtaggaaatagaatgaaaagtttagtgtttctttatctactaattgagccatttaatttttaaatgtttatattagataaccatattcacaatggaaactttaggtctagtttcttttgatagtatttataatataaatcaatcttattactgagagtgcaaattgtacaaggtatttacacatacaacttcatataactgagatgaatgtaattttgaactgtttaacactttttgttttttgcttattttgttggagtattattgaagatgtgatcaatagattgtaatacacatatctaaaaatagttaacacagatcaagtgaacattacattgccatttttaattcattctggtctttgaaagaaatgtactactaaagagcactagttgtgaatttagggtgttaaactttttaccaagtacaaaaatcccaaattcactttattattttgcttcaggatccaagtgacaaagttatatatttataaaattgctataaatcgacaaaatctaatgttgtctttttaatgttagtgatccacctgcctcagcctcccaaagtgctgggattacaggcttgaaagtctaacttttttttacttatatatttgatacatataattcttttggctttgaaacttgcaactttgagaacaaaacagtcctttaaattttgcactgctcaattctgtttttcgtttgcattgtctttaatataataaaagttattacctttacatattatcatgtctatttttgatgactcatcaattttgtctattaaagatatttctttaaattaaaaaaaaaaaaaaaaa

SEQ ID NO: 341 - DNA, 3431 bp, Homo sapiens
ggcttatagggctcgagcggccgcccgggcaggtatagaattcagcggccgctgaattctagggttttcaggagcccgagcgagggcgccgcttttgcgtccgggaggagccaaccgtggcgcaggcggcgcggggaggcgtcccagagtctcactctgccgcccaggctggactgcagtgacacaatctcggctgactgcaaccactgcctccagggttcaagcgattctcttgcctcagcctcccaagtagctgggattacagattgatgttcatgttcctggcactactacaagattcatactcctgatgctactgacaacgtggcttctccacagtcaccaaaccagggatgctatactggacttccctactctcatctgctccagccccctgaccttatagttgcccagctttcctggcaattgactttgcccatcaatacacaggatttagcatccagggaagatgtcggagcctcagatgttaattttctaattgagaatgttggcgctgtccgaacctggagacagaaaaacaaaaagtcctttctcctgattcaccaaaaaataaaatactgactaccatcactgtgatgagattcctatagtctcaggaactgaagtctttaaacaaccagggaccctctgcccctagaataagaacatactagaagtcccttctgctaggacaacgaggatcatgggagaccacctggaccttctcctaggagtggtgctcatggccggtcctgtgtttggaattccttcctgctcctttgatggccgaatagccttttatcgtttctgcaacctcacccaggtcccccaggtcctcaacaccactgagaggctcctgctgagcttcaactatatcaggacagtcactgcttcatccttcccctttctggaacagctgcagctgctggagctcgggagccagtatacccccttgactattgacaaggaggccttcagaaacctgcccaaccttagaatcttggacctgggaagtagtaagatatacttcttgcatccagatgcttttcagggactgttccatctgtttgaacttagactgtatttctgtggtctctctgatgctgtattgaaagatggttatttcagaaatttaaaggctttaactcgcttggatctatccaaaaatcagattcgtagcctttaccttcatccttcatttgggaagttgaattccttaaagtccatagatttttcctccaaccaaatattccttgtatgtgaacatgagctcgagcccctacaagggaaaacgctctccttttttagcctcgcagctaatagcttgtatagcagagtctcagtggactggggaaaatgtatgaacccattcagaaacatggtgctggagatagtagatgtttctggaaatggctggacagtggacatcacaggaaactttagcaatgccatcagcaaaagccaggccttctctttgattcttgcccaccacatcatgggtgccgggtttggcttccataacatcaaagatcctgaccagaacacatttgctggcctggccagaagttcagtgagacacctggacctttcacatgggtttgtcttctccctgaactcacgagtctttgagacactcaaggatttgaaggttctgaaccttgcctacaacaagataaataagattgcagatgaagcattttacggacttgacaacctccaagttctcaatttgtcatataaccttctgggggaactttgcagttcgaatttctatggactacctaaggtagcctacattgatttgcaaaagaatcacattgcaataattcaagaccaaacattcaaattcctggaaaaattacagaccttggatctccgagacaatgctcttacaaccattcattttattccaagcatacccgatatcttcttgagtggcaataaactagtgactttgccaaagatcaaccttacagcgaacctcatccacttatcagaaaacaggctagaaaatctagatattctctactttctcctacgggtacctcatctccagattctcattttaaatcaaaatcgcttctcctcctgtagtggagatcaaaccccttcagagaatcccagcttagaacagcttttccttggagaaaatatgttgcaacttgcctgggaaactgagctctgttgggatgtttttgagggactttctcatcttcaagttctgtatttgaatcataactatcttaattcccttccaccaggagtatttagccatctgactgcattaaggggactaagcctcaactccaacaggctgacagttctttctcacaatgatttacctgctaatttagagatcctggacatatccaggaaccagctcctagctcctaatcctgatgtatttgtatcacttagtgtcttggatataactcataacaagttcatttgtgaatgtgaacttagcacttttatcaattggcttaatcacaccaatgtcactatagctgggcctcctgcagacatatattgtgtgtaccctgactcgctctctggggtttccctcttctctctttccacggaaggttgtgatgaagaggaagtcttaaagtccctaaagttctcccttttcattgtatgcactgtcactctgactctgttcctcatgaccatcctcacagtcacaaagttccggggcttctgttttatctgttataagacagcccagagactggtgttcaaggaccatccccagggcacagaacctgatatgtacaaatatgatgcctatttgtgcttcagcagcaaagacttcacatgggtgcagaatgctttgctcaaacacctggacactcaatacagtgaccaaaacagattcaacctgtgctttgaagaaagagactttgtcccaggagaaaaccgcattgccaatatccaggatgccatctggaacagtagaaagatcgtttgtcttgtgagcagacacttccttagagatggctggtgccttgaagccttcagttatgcccagggcaggtgcttatctgaccttaacagtgctctcatcatggtggtggttgggtccttgtcccagtaccagttgatgaaacatcaatccatcagaggctttgtacagaaacagcagtatttgaggtggcctgaggatctccaggatgttggctggtttcttcataaactctctcaacagatactaaagaaagaaaaagaaaagaagaaagacaataacattccgttgcaaactgtagcaaccatctcctaatcaaaggagcaatttccaacttatctcaagccacaaataactcttcactttgtatttgcaccaagttatcattttggggtcctctctggaggttttttttttctttttgctactatgaaaacaacataaatctctcaattttcgtatcaaa

SEQ ID NO: 342 - DNA, 2540 bp, Homo sapiens
acgagacgaagacggaaccggagccggttgcgggcagtggacgcggttctgccgagagccgaagatggcagtgaacgtatactcaacgtcagtgaccagtgataacctaagtcgacatgacatgctggcctggatcaatgagtctctgcagttgaatctgacaaagatcgaacagttgtgctcaggggctgcgtattgtcagtttatggacatgctgttccctggctccattgccttgaagaaagtgaaattccaagctaagctagaacacgagtacatccagaacttcaaaatactacaagcaggttttaagagaatgggtgttgacaaaataattcctgtggacaaattagtaaaaggaaagtttcaggacaattttgaattcgttcagtggttcaagaagtttttcgatgcaaactatgatggaaaagactatgaccctgtggctgccagacaaggtcaagaaactgcagtggctccttcccttgttgctccagctctgaataaaccgaagaaacctctcacttctagcagtgcagctccccagaggcccatctcaacacagagaaccgctgcggctcctaaggctggccctggtgtggtgcgaaagaaccctggtgtgggcaacggagacgacgaggcagctgagttgatgcagcaggtcaacgtattgaaacttactgttgaagacttggagaaagagagggatttctacttcggaaagctacggaacattgaattgatttgccaggagaacgagggggaaaacgaccctgtattgcagaggattgtagacattctgtatgccacagatgaaggctttgtgatacctgatgaagggggcccacaggaggagcaagaagagtattaacagcctggaccagcagagcaacatcggaattcttcactccaaatcatgtgcttaactgtaaaatactcccttttgttatccttagaggactcactggtttcttttcataagcaaaaagtacctcttcttaaagtgcactttgcagacgtttcactccttttccaataagtttgagttaggagcttttaccttgtagcagagcagtattaacatctagttggttcacctggaaaacagagaggctgaccgtggggctcaccatgcggatgcgggtcacactgaatgctggagagatgtatgtaatatgctgaggtggcgacctcagtggagaaatgtaaagactgaattgaattttaagctaatgtgaaatcagagaatgttgtaataagtaaatgccttaagagtatttaaaatatgcttccacatttcaaaatataaaatgtaacatgacaagagattttgcgtttgacattgtgtctgggaaggaagggccagaccttggaacctttggaacctgctgtcaacaggtcttacagggctgcttgaaccctcataggcctaggctttggtctaaaaggaacatttaaaaagttgccctgtaaagttatttggtgtcattgaccaattgcatcccagctaaaaagcaagaggcatcgttgcctggataatagaggatgtgtttcagccctgagatgttacagttgaagagcttggtttcattgagcatttctctatttttccagttatcccgaaatttctatgtattattttttggggaagtgaggtgtgcccagttttttaatctaacaactacttttggggacttgcccacatctctgggatttgaatggggattgtatcccattttactgtcttttaggtttacatttaccacgtttctcttctctgctccccttgcccactgggactcctctttggctccttgaagtttgctgcttagagttggaagtgcagcaggcaggtgatcatgctgcaagttctttctggacctctggcaaagggagtggtcagtgaaggccatcgttaccttgggatctgccaggctggggtgttttcggtatctgctgttcacagctctccactgtaatccgaatactttgccagtgcactaatctctttggagataaaattcattagtgtgttactaaatgttaattttcttttgcggaaaatacagtaccgtgtctgaattaattattaatatttaaaatacttcattccttaactctccctcatttgctttgcccacagcctattcagttcctttgtttggcaggattctgcaaaatgtgtctcacccactactgagattgttcagcccctgatgtatttgtattgatttgtttctggtggtagcttgtcctgaaatgtgtgtagaaagcaagtattttatgataaaaatgttgtgtagtgcatgctctgtgtggaattcagaggaaaacccagattcagtgattaacaatgccaaaaaatgcaagtaactagccattgttcaaatgacagtggtgctatttctcttttgtggccttttagacttttgttgccctaaaattccattttattgggaacccattttccacctggtctttcttgacagggtttttttctactttaaacagtttctaaataaaattctgtatttcaaaaa

SEQ ID NO: 343 - DNA, 6156 bp, Homo sapiens
ggcggccgcagcctcggctacagcttcggcggcgaaggtcagcgccgacggcagccggcacctgacggcgtgaccgacccgagccgatttctcttggatttggctacacacttatagatcttctgcactgtttacaggcacagttgctgatatgtgttcaagatgagtgggatgggagaaaatacctctgacccctccagggcagagacaagaaagcgcaaggaatgtcctgaccaacttggacccagccccaaaaggaacactgaaaaacgtaatcgtgaacaggaaaataaatatatagaagaacttgcagagttgatttttgcaaattttaatgatatagacaactttaacttcaaacctgacaaatgtgcaatcttaaaagaaactgtgaagcaaattcgtcagatcaaagaacaagagaaagcagcagctgccaacatagatgaagtgcagaagtcagatgtatcctctacagggcagggtgtcatcgacaaggatgcgctggggcctatgatgcttgaggcccttgatgggttcttctttgtagtgaacctggaaggcaacgttgtgtttgtgtcagagaatgtgacacagtatctaaggtataaccaagaagagctgatgaacaaaagtgtatatagcatcttgcatgttggggaccacacggaatttgtcaaaaacctgctgccaaagtctatagtaaatgggggatcttggtctggcgaacctccgaggcggaacagccataccttcaattgtcggatgctggtaaaacctttacctgattcagaagaggagggtcatgataaccaggaagctcatcagaaatatgaaactatgcagtgcttcgctgtctctcaaccaaagtccatcaaagaagaaggagaagatttgcagtcctgcttgatttgcgtggcaagaagagttcccatgaaggaaagaccagttcttccctcatcagaaagttttactactcgccaggatctccaaggcaagatcacgtctctggataccagcaccatgagagcagccatgaaaccaggctgggaggacctggtaagaaggtgtattcagaagttccatgcgcagcatgaaggagaatctgtgtcctatgctaagaggcatcatcatgaagtactgagacaaggattggcattcagtcaaatctatcgtttttccttgtctgatggcactcttgttgctgcacaaacgaagagcaaactcatccgttctcagactactaatgaacctcaacttgtaatatctttacatatgcttcacagagagcagaatgtgtgtgtgatgaatccggatctgactggacaaacgatggggaagccactgaatccaattagctctaacagccctgcccatcaggccctgtgcagtgggaacccaggtcaggacatgaccctcagtagcaatataaattttcccataaatggcccaaaggaacaaatgggcatgcccatgggcaggtttggtggttctgggggaatgaaccatgtgtcaggcatgcaagcaaccactcctcagggtagtaactatgcactcaaaatgaacagcccctcacaaagcagccctggcatgaatccaggacagcccacctccatgctttcaccaaggcatcgcatgagccctggagtggctggcagccctcgaatcccacccagtcagttttcccctgcaggaagcttgcattcccctgtgggagtttgcagcagcacaggaaatagccatagttataccaacagctccctcaatgcacttcaggccctcagcgaggggcacggggtctcattagggtcatcgttggcttcaccagacctaaaaatgggcaatttgcaaaactccccagttaatatgaatcctcccccactcagcaagatgggaagcttggactcaaaagactgttttggactatatggggagccctctgaaggtacaactggacaagcagagagcagctgccatcctggagagcaaaaggaaacaaatgaccccaacctgcccccggccgtgagcagtgagagagctgacgggcagagcagactgcatgacagcaaagggcagaccaaactcctgcagctgctgaccaccaaatctgatcagatggagccctcgcccttagccagctctttgtcggatacaaacaaagactccacaggtagcttgcctggttctgggtctacacatggaacctcgctcaaggagaagcataaaattttgcacagactcttgcaggacagcagttcccctgtggacttggccaagttaacagcagaagccacaggcaaagacctgagccaggagtccagcagcacagctcctggatcagaagtgactattaaacaagagccggtgagccccaagaagaaagagaatgcactacttcgctatttgctagataaagatgatactaaagatattggtttaccagaaataacccccaaacttgagagactggacagtaagacagatcctgccagtaacacaaaattaatagcaatgaaaactgagaaggaggagatgagctttgagcctggtgaccagcctggcagtgagctggacaacttggaggagattttggatgatttgcagaatagtcaattaccacagcttttcccagacacgaggccaggcgcccctgctggatcagttgacaagcaagccatcatcaatgacctcatgcaactcacagctgaaaacagccctgtcacacctgttggagcccagaaaacagcactgcgaatttcacagagcacttttaataacccacgaccagggcaactgggcaggttattgccaaaccagaatttaccacttgacatcacattgcaaagcccaactggtgctggacctttcccaccaatcagaaacagtagtccctactcagtgatacctcagccaggaatgatgggtaatcaagggatgataggaaaccaaggaaatttagggaacagtagcacaggaatgattggtaacagtgcttctcggcctactatgccatctggagaatgggcaccgcagagttcggctgtgagagtcacctgtgctgctaccaccagtgccatgaaccggccagtccaaggaggtatgattcggaacccagcagccagcatccccatgaggcccagcagccagcctggccaaagacagacgcttcagtctcaggtcatgaatatagggccatctgaattagagatgaacatggggggacctcagtatagccaacaacaagctcctccaaatcagactgccccatggcctgaaagcatcctgcctatagaccaggcgtcttttgccagccaaaacaggcagccatttggcagttctccagatgacttgctatgtccacatcctgcagctgagtctccgagtgatgagggagctctcctggaccagctgtatctggccttgcggaattttgatggcctggaggagattgatagagccttaggaatacccgaactggtcagccagagccaagcagtagatccagaacagttctcaagtcaggattccaacatcatgctggagcagaaggcgcccgttttcccacagcagtatgcatctcaggcacaaatggcccagggtagctattctcccatgcaagatccaaactttcacaccatgggacagcggcctagttatgccacactccgtatgcagcccagaccgggcctcaggcccacgggcctagtgcagaaccagccaaatcaactaagacttcaacttcagcatcgcctccaagcacagcagaatcgccagccacttatgaatcaaatcagcaatgtttccaatgtgaacttgactctgaggcctggagtaccaacacaggcacctattaatgcacagatgctggcccagagacagagggaaatcctgaaccagcatcttcgacagagacaaatgcatcagcaacagcaagttcagcaacgaactttgatgatgagaggacaagggttgaatatgacaccaagcatggtggctcctagtggtatgccagcaactatgagcaaccctcggattccccaggcaaatgcacagcagtttccatttcctccaaactacggaataagtcagcaacctgatccaggctttactggggctacgactccccagagcccacttatgtcaccccgaatggcacatacacagagtcccatgatgcaacagtctcaggccaacccagcctatcaggccccctccgacataaatggatgggcgcaggggaacatgggcggaaacagcatgttttcccagcagtccccaccacactttgggcagcaagcaaacaccagcatgtacagtaacaacatgaacatcaatgtgtccatggcgaccaacacaggtggcatgagcagcatgaaccagatgacaggacagatcagcatgacctcagtgacctccgtgcctacgtcagggctgtcctccatgggtcccgagcaggttaatgatcctgctctgaggggaggcaacctgttcccaaaccagctgcctggaatggatatgattaagcaggagggagacacaacacggaaatattgctgacactgctgaagccagttgcttcttcagctgaccgggctcacttgctcaaaacacttccagtctggagagctgtgtctatttgtttcaacccaactgacctgccagccggttctgctagagcagacaggcctggccctggttcccagggtggcgtccactcggctgtggcaggaggagctgcctcttctcttgacagtctgaagctcgcatccagacagtcgctcagtctgttccctgcattcaccttagtgcaacttagatctctcctccccaagtaaatgttgacaggccaatttcatacccatgtcagattgaatgtatttaaatgtatgtatttaaggagaaccatgctcttgttctgttcctgttcggttccagacactggtttcttgctttgttttccctggctaacagtctagtgccaaagattaagattttatctgggggaaagaaaagaattttttaaaaaattaaactaaagatgttttaagctaaagcctgaatttgggatggaagcaggacagacaccgtggacagcgctgtatttacagacacacccagtgcgtgaagaccaacaaagtcacagtcgtatctctagaaagctctaaagaccatgttggaaagagtctccagttactgaacagatgaaaaggagcctgtgagagggctgttaacattagcaaatattttttccttgttttttctttgttaaaaccaaactggttcacctgaatcatgaattgagaagaaataattttcatttctaaattaagtcccttttagtttgatcagacagcttgaatcagcatctcttcttccctgtcagcctgactcttcccttcccctctctcattccccatactccctattttcattccttttttaaaaaataatataagctacagaaaccaggtaagccctttatttccttaaatgttttgccagccacttaccaattgctaagtattgaatttcagaaaaaaaaaatgcatttactggcaaggagaagagcaaagttaaggcttgataccaatcgagctaaggatacctgctttggaagcatgtttattctgttccccagcaactctggcctccaaaatgggagaaacgccagtgtgtttaaattgatagcagatatcacgacagatttaacctctgccatgtgttttttattttgttttttagcagtgctgactaagccgaagttttgtaaggtacataaaatccaatttatatgtaaacaagcaataatttaagttgagaacttatgtgttttaattgtataatttttgtgaggtatacatattgtggaattgactcaaaaatgaggtacttcagtattaaattagatatcttcatagcaatgtctcctaaaggtgttttgtaaaggatatcaatgccttgattagacctaatttgtagacttaagactttttattttctaaaccttgtgattctgcttataagtcatttatctaatctatatgatatgcagccgctgtaggaaccaattcttgatttttatatgtttatattctttcttaatgaaccttagaaagactacatgttactaagcaggccacttttatggttgttttt

SEQ ID NO: 344 - DNA, 1105 bp, Homo sapiens
gggcgggtagtcgaccgtgtccgcgcgcctgggagacgctgcctcggcccggacgcgcccgcgcccccgcggctggagggtggtcgccactgggacactgtgaaccaggagtgagtcggagctgccgcgctgcccaggccatggactgtgaggtcaacaacggttccagcctcagggatgagtgcatcacaaacctactggtgtttggcttcctccaaagctgttctgacaacagcttccgcagagagctggacgcactgggccacgagctgccagtgctggctccccagtgggagggctacgatgagctgcagactgatggcaaccgcagcagccactcccgcttgggaagaatagaggcagattctgaaagtcaagaagacatcatccggaatattgccaggcacctcgcccaggtcggggacagcatggaccgtagcatccctccgggcctggtgaacggcctggccctgcagctcaggaacaccagccggtcggaggaggaccggaacagggacctggccactgccctggagcagctgctgcaggcctaccctagagacatggagaaggagaagaccatgctggtgctggccctgctgctggccaagaaggtggccagtcacacgccgtccttgctccgtgatgtctttcacacaacagtgaattttattaaccagaacctacgcacctacgtgaggagcttagccagaaatgggatggactgaacggacagttccagaagtgtgactggctaaagcttgatgtggtcacagctgtatagctgcttccagtgtagacggagccctggcatgtcaacagcgttcctagagaagacaggctggaagatagctgtgacttctattttaaagacaatgttaaacttataacccactttaaaatatctacattaatatacttgaatgaaaatgtccatttacacgtatttgaatggccttcatatcatccacacatgaatctgcacatctgtaaatctacacacggtgcctttatttccactgtgcaggttcccacttaaaaattaaattggaaagcaggtttcaaggaagtagaaacaaaatacaatttttttggtaaaaaaaaa

SEQ ID NO: 345 - DNA, 2119 bp, Homo sapiens
gggatgtctctcccaagattccaaagagtaaactttgggccatatgataattacattccagtcagtgaattaagcaaaaaatcatggaatcagcaacactttgccctgttatttcccaaaccacaacggccaggaaccaaaaggagatcaaaaccttctcaaatacgggacaacacggtttctataattgatgaagaacaattaagaggagatcgtagacaaccattatggatgtaccgttctttaatgagaatttctgagagaccatctgtttatttagctgccaggaggcagcctctcaaaccaactcgtactgtcgaggtggattctaaagcagcagaaattggtaagaaaggtgaagacaagacaacacagaaggacacaacagattcggaatcagaattaaaacaaggaaaaaaagattcaaagaaaggcaaggatatagagaaaggaaaagaagaaaagctagatgcaaagaaagatagcaaaaaaggtaaaaaggatgcagagaagggcaaagactcagcaacagaatctgaagatgaaaaaggaggtgcaaagaaagataacaaaaaagataaaaaggattcaaacaaaggcaaagactcggcaacagaatctgaaggtgaaaaaggaggtacagagaaagatagcaaaaaaggtaaaaaggattcaaagaagggcaaggattcagccatagaattacaagctgtaaaagcagatgaaaagaaggatgaggatggaaaaaaagatgcaaacaaaggtgatgaatcgaaggatgccaagaaagatgcaaaggagattaaaaaaggtaagaaagataagaagaagcccagtagtacagacagtgactcaaaggatgatgtcaagaaagagtctaagaaggacgccacgaaagatgccaagaaagttgccaagaaagatactgagaaagaatctgctgattcaaagaaggatgcaaagaaaaatgctaagaaggatgcaaagaaggatgcaaagaagaatgcaaagaaggatgaaaagaaggatgcaaagaagaagggcaagtaggccttggataagaatttgaaccgaaagaataattcaaaagcatatttgatgaaacaatagtggtagtctgcagctgaatttgtgagaaaacaagaggcctcaaagaattaaataatttttaaaaggtggtaaagaaggatacaaaggagaactcagcagagatttataaaaatatataagaaagatgttaagaaaaattaaggggggatccattgaaagacttgaagaatacatatacttatattcggggatatgaaggattcaatgaatgatctctagaaagatttaaagaagaatattcagataaggatgttgaagataatgacactaaatctatggacacacacacacacacacacacacacacacacacacacacacacacacacagtttaatgaaggcttaaagaatccaaggagacagatgttgtatctatagatttaaaataatctcaagctgcatccacagatacaaaaaaatataggagccatgaaatgaagttaaacaccttgtagaaagcctactttcaagtaaatatagcattcctttggcaaaaaaaaaaaaaaaagtaaaagaaaagaaaaaaaatgtattaccacccgatgagcctacatctttctttctgaagtttaaacaaccacagtcatgtttatggttgttggatgtgccacttccaatccaaaagaagcacacttgtctcgctctgttgccctggctggagttcagtgacatgatctcaggcttactacagcctccaccttcaggttcaagtgattctcctgcctcagcctctctggtagctgggattacagggaaggaaaatagctggcatttcttgctggagaaagttatcacaagtggaaaggttaccctagaaacaaaagatgactaccgtgaggatggattggacattacaccacactggaaaagtgaaacatctcattcagttggtgatcttcctgtcatgaaagttgcttgacagctctaattacgaattgaacacattaaacacctggtgaaattatcaattaaaaacatctagtcaccataaaaaaaaaaaaaaaaccc

SEQ ID NO: 346 - DNA, 482 bp, Homo sapiens
  misc_feature (89)..(89): n is a, c, g, or t
  misc_feature (117)..(117): n is a, c, g, or t
  misc_feature (142)..(142): n is a, c, g, or t
  misc_feature (164)..(164): n is a, c, g, or t
  misc_feature (275)..(275): n is a, c, g, or t
  misc_feature (319)..(319): n is a, c, g, or t
  misc_feature (338)..(340): n is a, c, g, or t
atgatgaagtgtccacaggctttactagctatcttttggcttctactgagctgggtgagcagtgaagacaaggtggtacaaagccctcnatctctggttgtccacgagggagacacngtaactctcaattgcagttatgaantgactaactttcgaagcctacnatggtacaagcaggaaaagaaagctcccacatttctatttatgctaacttcaagtggaattgaaaagaagtcaggaagactaagtagcatattagataagaaagaactttncagcatcctgaacatcacagccacccagaccggagactcggccntctacctctgtgctgtggnnncctattctaacgactacaagctcagctttggagccggaaccacagtaactgtaagagcaaccacatgtagctagagactattataccagacagagcagcctagatcttctccagtctgacacccaccagccccaggacttga

SEQ ID NO: 347 - DNA, 1823 bp, Homo sapiens
ggcacgaggccaagactgagccggcggccgcggcgcagcgaacgagcagtgaccgtgctcctacccagctctgcttcacagcgcccacctgtctccgcccctcggcccctcgcccggctttgcctaaccgccacgatgatgttctcgggcttcaacgcagactacgaggcgtcatcctcccgctgcagcagcgcgtccccggccggggatagcctctcttactaccactcacccgcagactccttctccagcatgggctcgcctgtcaacgcgcaggacttctgcacggacctggccgtctccagtgccaacttcattcccacggtcactgccatctcgaccagtccggacctgcagtggctggtgcagcccgccctcgtctcctctgtggccccatcgcagaccagagcccctcaccctttcggagtccccgccccctccgctggggcttactccagggctggcgttgtgaagaccatgacaggaggccgagcgcagagcattggcaggaggggcaaggtggaacagttatctccagaagaagaagagaaaaggagaatccgaagggaaaggaataagatggctgcagccaaatgccgcaaccggaggagggagctgactgatacactccaagcggagacagaccaactagaagatgagaagtctgctttgcagaccgagattgccaacctgctgaaggagaaggaaaaactagagttcatcctggcagctcaccgacctgcctgcaagatccctgatgacctgggcttcccagaagagatgtctgtggcttcccttgatctgactgggggcctgccagaggttgccaccccggagtctgaggaggccttcaccctgcctctcctcaatgaccctgagcccaagccctcagtggaacctgtcaagagcatcagcagcatggagctgaagaccgagccctttgatgacttcctgttcccagcatcatccaggcccagtggctctgagacagcccgctccgtgccagacatggacctatctgggtccttctatgcagcagactgggagcctctgcacagtggctccctggggatggggcccatggccacagagctggagcccctgtgcactccggtggtcacctgtactcccagctgcactgcttacacgtcttccttcgtcttcacctaccccgaggctgactccttccccagctgtgcagctgcccaccgcaagggcagcagcagcaatgagccttcctctgactcgctcagctcacccacgctgctggccctgtgagggggcagggaaggggaggcagccggcacccacaagtgccactgcccgagctggtgcattacagagaggagaaacacatcttccctagagggttcctgtagacctagggaggaccttatctgtgcgtgaaacacaccaggctgtgggcctcaaggacttgaaagcatccatgtgtggactcaagtccttacctcttccggagatgtagcaaaacgcatggagtgtgtattgttcccagtgacacttcagagagctggtagttagtagcatgttgagccaggcctgggtctgtgtctcttttctctttctccttagtcttctcatagcattaactaatctattgggttcattattggaattaacctggtgctggatattttcaaattgtatctagtgcagctgattttaacaataactactgtgttcctggcaatagtgtgttctgattagaaatgaccaatattatactaagaaaagatacgactttattttctggtagatagaaataaatagctatatccatgaaaaaaaaaaaaaaaaaaaaa

SEQ ID NO: 348 - DNA, 2152 bp, Homo sapiens
gatctgattggccaccttctccaattcttcttgcaactgggttgaagacgtatgagcacgggcaaactcatttaatgtctgccaagcacttttgagagagctaataaaaccctgcttcaaatcagatcccatacgagagagactctctttcaattctaaatgaagtctttttctgcctttgtgatgtggaatgagaacagcttttaggtccaaatctggaacaatcataggttctaatctatatgccactggatcaagcggatgataaatattgaagaaccctttacaggtaggaaggctgtaattctcatctatcctatcaactcctcgaatagtgagaaacatagcaattggagaccccaaggcaaagaatatctctggttcaaaatctaatgagttgtaagcaacagaaacctgtccggcgccaacttcaaaagattcataattcacacacacagaagacacgcaagcaccaactggaagtttcctctttggctcattggattctgaggggagggaagccatgtctttagtcttctgggcactttgctcttgtccttttgtagaagtggccgccactgccttcttttctgatgctgcttttttcagtttggctgctttatgttctacaaagttagctatcttctttctgggtccaaggggtatccccatttccttcaggtcatcaactgtacacataagcagggactccatatcaatcttttccttttcaaaagtgctaaaatattcagagaggctaagtgcttccagagtttcttgcaaagttaggacttcttcattttcaacaacaaggtcatacgactcatccaaagtcagctttggctcttcaggcatctgcttttcctgaaaatgtagctgcttcacaactccattagcaacagcaagaggtccagggcactttgataaattcaaatctttttgattagacaggatgtcaaacaatattaaagaacctaaactgtgaccagcaacagagacacctcctttgaagtctgggttccgactcataaagagtgcatgcagatggtttatctccattcctactttttccacaattgtctgacagtaggtggggctgttataaaataaaatatctagcaaagtttcattggtaaagtgacgaaatcgaccaatacttggcaaagtgattttcttaatattcctgtccacacctgtggcgtccccacccaaagaactatgccaatgaactggaaggaactccactctgcttactttcccgtcatctaaagatttcttgaaatgtgtccgcagcaatttgagagaaaccaccctaaaatcatccacacactcaataatgctcctaaagcgtaagtcacacacaggtccaatgccatgcaccacaaacaccaaatggtcaacttgaggcatctcgtacatctgaacagggggtccagaaggtggaggatgagcaggagggcctggtgtttggcactgctgcagctggggtggtgcaatgtaaggattagccctgctgctgccaggggtatggcgatatggattgtatcctggttggggaattccttggggttggttcccaaaatatgaaggagggagactacttggctgagaaggcagataagaatttattcccatcagtgaggaaggtggagcaccaggttgagccttcgaaatggatggtgaaaatgcattcgagacatcttgggatccagttgtaaaagggagagcagtcaggggcttggggaatcctgattgtccaactgaggttgctgcagttgttaatggtgactgtccaatattcccaaaaggatcactgctgcttgatacctgagagaagtaactaaatgtctgtggggcagatgtgtgaatagaagtctgaccaaggaagctgtcctcctcaccaacatctgtggaatcctctcccggtaagagcagggaggccggagaagcggaggcctgggtgactgggatgaagggcacattgaagctgaactccgtggccgaggaggagaaaagtaagttagtgcccgatgaggaagtggaggcgccgccgctgccaccgttaggttttctctcggccatggctgcggcccaccgtccgatacacgtctccgggtacccggtaccacaccactgaccggaaaccgatcac

SEQ ID NO: 349 - DNA, 1113 bp, Homo sapiens
  misc_feature (213)..(213): n is a, c, g, or t
  misc_feature (494)..(494): n is a, c, g, or t
  misc_feature (519)..(519): n is a, c, g, or t
  misc_feature (535)..(535): n is a, c, g, or t
  misc_feature (541)..(541): n is a, c, g, or t
  misc_feature (567)..(567): n is a, c, g, or t
  misc_feature (579)..(580): n is a, c, g, or t
  misc_feature (587)..(587): n is a, c, g, or t
  misc_feature (600)..(600): n is a, c, g, or t
  misc_feature (622)..(622): n is a, c, g, or t
  misc_feature (926)..(926): n is a, c, g, or t
  misc_feature (1099)..(1099): n is a, c, g, or t
attagagtctgtgcttcacttccgttccagcctcagcggcagctggatcgctcgacggagtgcctctggtagttggccaagacgccgaatatcaaaatcttcagcggcagctcccaccaggacttatcccagaaaattgctgaccgcctgggcctggagctaggcaaggtggtgactaagaaattcagcaaccaggagacctgcgtggaaatngatgagagtgtgcgtggagaggatgtctacatcgttcagagtggttgtggcgaaatcaacgacagtctaatggagcttttgatcatgattaatgcctgcaagattgcttcagctagccgagttactgcagtcatcccatgcttcccttatgcccgacaggataagaaggataagagccggtccccaatctctgccaagcttgttgcaaatatgctctctatagcaggtgcggatcatatcatcaccatggacctacatgcttctcaaattcagggcttttntgatatcccagtagacaacttgtantgcagagccaactgtnctgaangtggataagggagaatatccctgagntggaagaactgnncattatntgtctcgccagantgctggtggagctaaaagagtngacctccattgcagaccagttgaatgtggactttgctttgattcataaagaacggaagaaggccaatgaagtggactgcatagtgctagtgggagatgtgaatgatcgtgtggctatccttgtagatgacatggcagacacttgtgttacaatctgcctcgcagctgacaaacttctctcagctggagcaaccagagtttatgctatcttgactcatggaatcttttctggcccagccatttctcgcatcaacactgcatgctttgaagcagtggtagtcaccaataccatacctcaagatganaagatgaagcattgctccaaaatacgagtaattgacatctccatgatccttgcagaagccataaggagaactcataatggggaatctgtttcctacctgttcagccatgttcctttataacagaataacttctaggttatgctattttaaaataaaataagattaataaaaanaaaccttgccttta

SEQ ID NO: 350 - DNA, 1971 bp, Homo sapiens
  misc_feature (246)..(246): n is a, c, g, or t
  misc_feature (249)..(249): n is a, c, g, or t
  misc_feature (482)..(482): n is a, c, g, or t
  misc_feature (653)..(653): n is a, c, g, or t
  misc_feature (678)..(678): n is a, c, g, or t
  misc_feature (680)..(680): n is a, c, g, or t
  misc_feature (692)..(692): n is a, c, g, or t
  misc_feature (709)..(709): n is a, c, g, or t
  misc_feature (713)..(713): n is a, c, g, or t
  misc_feature (1265)..(1265): n is a, c, g, or t
  misc_feature (1323)..(1324): n is a, c, g, or t
  misc_feature (1338)..(1338): n is a, c, g, or t
  misc_feature (1357)..(1357): n is a, c, g, or t
  misc_feature (1368)..(1368): n is a, c, g, or t
  misc_feature (1398)..(1398): n is a, c, g, or t
  misc_feature (1404)..(1404): n is a, c, g, or t
  misc_feature (1448)..(1448): n is a, c, g, or t
  misc_feature (1459)..(1459): n is a, c, g, or t
  misc_feature (1472)..(1472): n is a, c, g, or t
  misc_feature (1682)..(1682): n is a, c, g, or t
  misc_feature (1693)..(1693): n is a, c, g, or t
  misc_feature (1806)..(1806): n is a, c, g, or t
  misc_feature (1946)..(1946): n is a, c, g, or t
cggacgcgtgggttaaagaggaggtccagaatctgacgtcagatgcttaacgagctgcaagaggaaatggcgcctatgactacgatgaacttcagagcagagtgtccaatcttgaagaaaggctccgtgcatgcatgcaaaaactagcttgcgggaagttgacgggcatcagtgaccccgtgactgtcaagacctccggctcgaggttcggatcctggatgacagaccctctcgcccctgaaggcnatnaaccgggtgtggtacatggacggctatcacaacaaccgcttcgtacgtgagtacaagtccatggttgacttcatgaacacggacaatttcacctcccaccgtctcccccacccctggtcgggcacggggcaggtggtctacaacggttctatctacttcaacaagttccagagccacatcatcatcaggtttgacctgaagacagagaccatcctcaagacccgcagcctggnactatgccggttacaacaacatgtaccactacgcctggggtggccactcggacatcgacctcatggtggacgagagcgggctgtgggccgtgtacgccaccaaccagaacgctggcaacatcgtggtcagtaggctggaccccgtgtccctgcagaccctgcagacctggnaacacgagctaccccaagcgcagcncnggggaggccttncatcatctgcggcacgntgtnacgtcaccaacggctactcagggggtaccaaggtccactatgcataccagaccaatgcctccacctatgaatacatcgacatcccattccagaacaaatactcccacatctccatgctggactacaaccccaaggaccgggccctgtatgcctggaacaacggccaccagatcctctacaacgtgaccctcttccacgtcatccgctccgacgagttgtagctccctcctcctggaagccaagggcccacgtcctcaccacaaagggactcctgtgaaactgctgccaaaaagataccaataacactaacaataccgatcttgaaaaatcatcagcagtgcggattctgacatcgagggatggcattacctccgtgtttctccctttcgagccggcgggccacagacgtcggaagaaactcccgtatttgcagctggaactgcagcccacggcgccccggttttcctccccgccctgtccctctctggtcaaacaacatactaaagaggcgaggcaatgactgttggccagttctcaccggggaaaaacccnactgttaggatggcatgaacatttccttagatcgtggtcagctccgaggaatgtggcnnccaggctctttgangagccatgggctgcacccnggccgtaggcntagtgtaactcgcatcccattgcagtgccngtttcnttgactgtgttgctgtctcttagattaaccgtgctgaggctccnacatagctccntggacctgtgtcntagtacatactgaagcgatggtcagagtgtgtagagtgaagttgctgtgcccacattgtttgaactcgcgtaccccgtagatacattgtgcaacgttcttctgttattcccttgaggtggtaacttcgtatgttcagtttatgcgatgattgttgtaaatgcaatgccgtagtttggattaataagtggatggtttttgtttctaaaaanaaaaaaaaaantcagtgttcacccttatagagacatagtcaagttcatgttgataataatcaaaggaattactctcttcttgttaaattagctaaatcatgtaaccgcagataggaagggctcncctggggaaactctggtttccgatgggacaggaaagtcatacgggcaacagtatgcggaaagtacgttttttaagtaaaaaacaaaggcaaactttgtactatccagttatctaaggaacaataaaaacattaggagatnaaaaaaaaaaaaaaaaaaaaaaaaa

SEQ ID NO: 351 - DNA, 1670 bp, Homo sapiens
ccaaccacaagcaccaaagcagaggggcaggcagcacaccacccagcagccagagcaccagcccagccatggtccttgaggtgagtgaccaccaagtgctaaatgacgccgaggttgccgccctcctggagaacttcagctcttcctatgactatggagaaaacgagagtgactcgtgctgtacctccccgccctgcccacaggacttcagcctgaacttcgaccgggccttcctgccagccctctacagcctcctctttctgctggggctgctgggcaacggcgcggtggcagccgtgctgctgagccggcggacagccctgagcagcaccgacaccttcctgctccacctagctgtagcagacacgctgctggtgctgacactgccgctctgggcagtggacgctgccgtccagtgggtctttggctctggcctctgcaaagtggcaggtgccctcttcaacatcaacttctacgcaggagccctcctgctggcctgcatcagctttgaccgctacctgaacatagttcatgccacccagctctaccgccgggggcccccggcccgcgtgaccctcacctgcctggctgtctgggggctctgcctgcttttcgccctcccagacttcatcttcctgtcggcccaccacgacgagcgcctcaacgccacccactgccaatacaacttcccacaggtgggccgcacggctctgcgggtgctgcagctggtggctggctttctgctgcccctgctggtcatggcctactgctatgcccacatcctggccgtgctgctggtttccaggggccagcggcgcctgcgggccatgcggctggtggtggtggtcgtggtggcctttgccctctgctggaccccctatcacctggtggtgctggtggacatcctcatggacctgggcgctttggcccgcaactgtggccgagaaagcagggtagacgtggccaagtcggtcacctcaggcctgggctacatgcactgctgcctcaacccgctgctctatgcctttgtaggggtcaagttccgggagcggatgtggatgctgctcttgcgcctgggctgccccaaccagagagggctccagaggcagccatcgtcttcccgccgggattcatcctggtctgagacctcagaggcctcctactcgggcttgtgaggccggaatccgggctcccctttcgcccacagtctgacttccccgcattccaggctcctccctccctctgccggctctggctctccccaatatcctcgctcccgggactcactggcagccccagcaccaccaggtctcccgggaagccaccctcccagctctgaggactgcaccattgctgctccttagctgccaagccccatcctgccgcccgaggtggctgcctggagccccactgcccttctcatttggaaactaaaacttcatcttccccaagtgcggggagtacaaggcatggcgtagagggtgctgccccatgaagccacagcccaggcctccagctcagcagtgactgtggccatggtccccaagacctctatatttgctcttttatttttatgtctaaaatcctgcttaaaacttttcaataaacaagatcgtcaggaccaaaaaaaaaaaaaaaaaaaaaaaaaaaaaaaaaaaaaaaaaaaaaaa

SEQ ID NO: 352 - DNA, 1476 bp, Homo sapiens
cccacgcgtccggaacagacgttccctcgcggccctggcacctccaaccccagatatgctgctgctgctgctgctgcccctgctctgggggagggagagggtggaaggacagaagagtaaccggaaggattactcgctgacgatgcagagttccgtgaccgtgcaagagggcatgtgtgcccatgtgcgctgctccttctcctacccagtggacagccagactgactctgacccagttcatggctactggttccgggcagggaatgatataagctggaaggctccagtggccacaaacaacccagcttgggcagtgcaggaggaaactcgggaccgattccacctccttggggacccacagaccaaaaattgcaccctgagcatcagagatgccagaatgagtgatgcggggagatacttctttcgtatggagaaaggaaatataaaatggaattataaatatgaccagctctctgtgaacgtgacagaccctcctcagaacttgactgtgactgtcttccaaggagaaggcacagcatccacagctctggggaacagctcatctctttcagtcctagagggccagtctctgcgcttggtctgtgctgttgacagcaatccccctgccaggctgagctggacctggaggagtctgaccctgtacccctcacagccctcaaaccctctggtactggagctgcaagtgcacctgggggatgaaggggaattcacctgtcgagctcagaactctctgggttcccagcacgtttccctgaacctctccctgcaacaggagtacacaggcaaaatgaggcctgtatcaggagtgttgctgggggcggtcgggggagctggagccacagccctggtcttcctctccttctgtgtcatcttcattgtagtgaggtcctgcaggaagaaatcggcaaggccagcagcggacgtgggagacataggcatgaaggatgcaaacaccatcaggggctcagctctcagggtaacctgactgagtcctgggcagatgataacccccgacaccatggcctggctgcccactcctcaggggaggaaagagagatccagtatgcacccctcagctttcataagggggagcctcaggacctatcaggacaagaagccaccaacaatgagtactcagagatcaagatccccaagtaagaaaatgcagaggctcgggcttgtttgagggttcacgacccctccagcaaaggagtctgaggctgattccagtagaattagcagccctcaatgctgtgcaacaagacatcagaacttattcctcttgtctaactgaaaatgcatgcctgatgaccaaactctccctttccccatccaatcggtccacactccccgccctggcctctggtacccaccattctcctctgtacttctctaaggatgactactttagattccgaatatagtgagattgtaacgtgaaaaaaaaaaaaaaaa

SEQ ID NO: 353 - DNA, 4775 bp, Homo sapiens
acccgcgcgaggtaggcgctctggtgcttgcggaggacgcttccttcctcagatgcaccgatcttcccgatactgcctttggagcggctagattgctagccttggctgctccattggcctgccttgccccttacctgccgattgcatatgaactcttcttctgtctgtacatcgttgtcgtcggagtcgtcgcgatcgtcgtggcgctcgtgtgatggccttcgtccgtttagagtagtgtagttagttaggggccaacgaagaagaaagaagacgcgattagtgcagagatgctggaggtggtcagttactaagctagagtaagatagcggagcgaaaagagccaaacctagccggggggcgcacggtcacccaaaggaggtcgactcgccggcgcttcctatcgcgccgagctccctccattcctctccctccgccgaggcgcgaggttgcggcgcgcagcgcagcgcagctcagcgcaccgactgccgcgggctccgctgggcgattgcagccgagtccgtttctcgtctagctgccgccgcggcgaccgctgcctggtcttcctcccggacgctagtgggttatcagctaacacccgcgagcatctataacataggccaactgacgccatccttcaaaaacaactaaaggatgatatgatgaacctagcctgttaatttcgtcttctcaattttaaactttggttgcttaagactgaagcaatcatggtgaacctgaggaatgcggtgcattcattccttgtgcacctaattggcctattggtttggcaatgtgatatttctgtgagcccagtagcagctatagtaactgacattttcaatacctccgatggtggacgcttcaaattcccagacggggtacaaaactggccagcactttcaatcgtcatcataataatcatgacaataggtggcaacatccttgtgatcatggcagtaagcatggaaaagaaactgcacaatgccaccaattacttcttaatgtccctagccattgctgatatgctagtgggactacttgtcatgcccctgtctctcctggcaatcctttatgattatgtctggccactacctagatatttgtgccccgtctggatttctttagatgttttattttcaacagcgtccatcatgcacctctgcgctatatcgctggatcggtatgtagcaatacgtaatcctattgagcatagccgtttcaattcgcggactaaggccatcatgaagattgctattgtttgggcaatttctataggtgtatcagttcctatccctgtgattggactgagggacgaagaaaaggtgttcgtgaacaacacgacgtgcgtgctcaacgacccaaatttcgttcttattgggtccttcgtagctttcttcataccgctgacgattatggtgattacgtattgcctgaccatctacgttctgcgccgacaagctttgatgttactgcacggccacaccgaggaaccgcctggactaagtctggatttcctgaagtgctgcaagaggaatacggccgaggaagagaactctgcaaaccctaaccaagaccagaacgcacgccgaagaaagaagaaggagagacgtcctaggggcaccatgcaggctatcaacaatgaaagaaaagcttcgaaagtccttgggattgttttctttgtgtttctgatcatgtggtgcccatttttcattaccaatattctgtctgttctttgtgagaagtcctgtaaccaaaagctcatggaaaagcttctgaatgtgtttgtttggattggctatgtttgttcaggaatcaatcctctggtgtatactctgttcaacaaaatttaccgaagggcattctccaactatttgcgttgcaattataaggtagagaaaaagcctcctgtcaggcagattccaagagttgccgccactgctttgtctgggagggagcttaatgttaacatttatcggcataccaatgaaccggtgatcgagaaagccagtgacaatgagcccggtatagagatgcaagttgagaatttagagttaccagtaaatccctccagtgtggttagcgaaaggattagcagtgtgtgagaaagaacagcacagtcttttcctacggtacaagctacatatgtaggaaaattttcttctttaatttttctgttggtcttaactaatgtaaatattgctgtctgaaaaagtgtttttacatatagctttgcaaccttgtactttacaatcatgcctacattagtgagatttagggttctatatttactgtttataataggtggagactaacttattttgattgtttgatgaataaaatgtttatttttgctctccctcccttctttccttccttttttcctttcttccttcctttctctctttcttttgtgcatatggcaacgttcatgttcatctcaggtggcatttgcaggtgaccagaatgaggcacatgacagtggttatatttcaaccacacctaaattaacaaattcagtggacatttgttctgggttaacagtaaatatacactttacattcttgctctgctcatctacacatataaacacagtaagataggttctgctttctgatacatctgtcagtgagtcagaggcagaacctagtcttgttgttcatataggggcaaaaatttgacattgtcagaatgttgtgttggtatttactgcaatgtctgtccctaaacatagtggtattttaacatagcagctggttaaccgggactacagaagtggaaggataatgagatgtaatacaccaaatagcttttcacttcttaaggacagtgttcaaattctgattattacaacaagcaaactgaaattagtgttttcattctggtccttagtaaattcctaattctatgattaaactgggaaatgagatcccagagttatttcccaacccaggattcaacatcaattgggttttgatctcagcatcctggaaatttgtgtgcttcacacaaagtgaaattagtattttgagccttattaaaatattttcttaattatggtacctctgtctataggacttaatttagcagtccatttttgagtaaaacttgtattggaagtatagatggtagaaactttggaagttttacttgattaaggactacagaattgggcccttagaatgtgaaaaaaaaaagtaattaaaaagacacttttaccgaactcgggattacagaaacacggagtttccatttggattttaaacaaaatttatgtcattttcagatccttccaaactctctagtgcaggaaaaggctgcagctaatttgtgaaagtggcaagctcttcattgcactgcagttatttaccagaagtttaaatctttgttaaaatatagtgttgtgttacaataagtgttggccatcatttcattcgtgggcctgctgctctctaagaattcagtagcattttaatagtttctaaaccatgaaaagttttcaagcattgctaaagtcaggccattcagtctatgctgtgtgcagagtatacaagtgtttctagtaacagtatttccatacgtgcccatttcacacaactgtggataaattttggaagaattcatgatgctagttcttacgcttgacagttacttacacacctgagaatgtgcctctcagtatcttaaaattggttaatgaaaaatctgaatttctaaaacccttggtctgtgttctcaacacacagtatagataaatccaatagtctgccacaagggcagtggaagagctgctgtatttgaggaaactcatacagtctctatttgatttgcaacactggccaaacatcagtcatttgcttgagcatgcccaaatattacatgaaagtcaagtctacctgccttgcctgttaggtctgttgaagtgcatgttaaaataattatatgaagcagaatgagatgatttaattcttaccgaaatgaaaatggctgaagaaacacagcatgcatttagcatgagttctgcacatacagatggtgtcctgcatgtatgccatgtatgttgcatgaatccatcgatttgtattaatgtagggcagaatagctgatagaagaaggactgaagaaaatccttcagcaatccttaaaaagaccatgcattcagatctgaagtagtgtgagtgttagaaaaaactggaaacatctgatttctgaactatcagggcaagctcatagcacatgttttacaaagaaacaaaatataaatcacagatttccaaaagtactagcaataagttgaatgataatagctcacagcacatttgttaatgattcttgtgtcatcaagtagtagtacttaatagtacccaacctggtaattatcctcaagttgtgtgctattcgtaagttctgtgcagtttggtatgaaacaaatatactcatttggatataaatcttacccttcaatgttaaatctacaaacttttataaatgttttaaagaagtccatgtgataattgtaaaggtgatgaatttaccatcaaacaaatcattttgatgtattattatatatgtatatctgtgtaagacacgtgcaacagactgccttatattattttctgtaattcttctcctttgtcaaatggtattttttgtgaatggttgcaaagtgttgtcttattcctaattcctgtatgttatccactacaggttttatgagacttcctattaatttattaaatttattaaatgttgaaaaaaaaaaaaaaaaaaaaaaa

SEQ ID NO: 354 - DNA, 2379 bp, Homo sapiens
ggaattccggtcggcctctcgcccttcagctacctgtgcgtccctccgtcccgtcccgtcccggggtcaccccggagcctgtccgctatgcggctcctgcctctagccccaggtcggctccggcggggcagcccccgccacctgccctcctgcagcccagcgctgctactgctggtgctgggcggctgcctgggggtcttcggggtggctgcgggaacccggaggcccaacgtggtgctgctcctcacggacgaccaggacgaagtgctcggcggcatgacaccactaaagaaaaccaaagctctcatcggagagatggggatgactttttccagtgcttatgtgccaagtgctctctgctgccccagcagagccagtatcctgacaggaaagtacccacataatcatcacgttgtgaacaacactctggaggggaactgcagtagtaagtcctggcagaagatccaagaaccaaatactttcccagcaattctcagatcaatgtgtggttatcagaccttttttgcagggaaatatttaaatgagtacggagccccagatgcaggtggactagaacacgttcctctgggttggagttactggtatgccttggaaaagaattctaagtattataattacaccctgtctatcaatgggaaggcacggaagcatggtgaaaactatagtgtggactacctgacagatgttttggctaatgtctccttggactttctggactacaagtccaactttgagcccttcttcatgatgatcgccactccagcgcctcattcgccttggacagctgcacctcagtaccagaaggctttccagaatgtctttgcaccaagaaacaagaacttcaacatccatggaacgaacaagcactggttaattaggcaagccaagactccaatgactaattcttcaatacagtttttagataatgcatttaggaaaaggtggcaaactctcctctcagttgatgaccttgtggagaaactggtcaagaggctggagttcactggggagctcaacaacacttacatcttctatacctcagacaatggctatcacacaggacagttttccttgccaatagacaagagacagctgtatgagtttgatatcaaagttccactgttggttcgaggacctgggatcaaaccaaatcagacaagcaagatgctggttgccaacattgacttgggtcctactattttggacattgctggctacgacctaaataagacacagatggatgggatgtccttattgcccattttgagaggtgccagtaacttgacctggcgatcagatgtcctggtggaataccaaggagaaggccgtaacgtcactgacccaacatgcccttccctgagtcctggcgtatctcaatgcttcccagactgtgtatgtgaagatgcttataacaatacctatgcctgtgtgaggacaatgtcagcattgtggaatttgcagtattgcgagtttgatgaccaggaggtgtttgtagaagtctataatctgactgcagacccagaccagatcactaacattgctaaaaccatagacccagagcttttaggaaagatgaactatcggttaatgatgttacagtcctgttctgggccaacctgtcgcactccaggggtttttgaccccggatacaggtttgacccccgtctcatgttcagcaatcgcggcagtgtcaggactcgaagattttccaaacatcttctgtagcgacctcacacagcctctgcagatggatccctgcacgcctctttctgatgaagtgattgtagtaggtgtctgtagctagtcttcaagaccacacctggaagagtttctgggctggctttaagtcctgtttgaaaaagcaacccagtcagctgacttcctcgtgcaatgtgttaaactgtgaactctgcccatgtgtcaggagtggctgtctctggtctcttcctttagctgacaaggacactcctgaggtctttgttctcactgtattttttttatcctggggccacagttcttgattattcctcttgtggttaaagactgaatttgtaaacccattcagataaatggcagtactttaggacacacacaaacacacagatacaccttttgatatgtaagcttgacctaaagtcaaaggacctgtgtagcatttcagattgagcacttcactatcaaaaatactaacatcacatggcttgaagagtaaccatcagagctgaatcatccaagtaagaacaagtaccattgttgattgataagtagagatacattttttatgatgttcatcacagtgtggtaaggttgcaaattcaaaacatgtcacccaagctctgttcatgtttttgtgaattc

SEQ ID NO: 355 - DNA, 3400 bp, Homo sapiens
gcagcgccaaccgcccagccgctctgactgctccggctgcccgcccgcgcggcgcgggctgtcctggaccctaggaggggacggaaccggacttgcctttgggcaccttccagggccctctccaggtcggctggctaatcatcggacagacggactgcacacatcttgtttccgcgtctccgcaaaaacgcgaggtccaggttgtagactcttgtgctggttgcaggccaagtggacctgtactgaaaatgggtccaataggtgcagaggctgatgagaaccagacagtggaagaaatgaaggtggaacaatacgggccacaaacaactcctagaggtgaactggtccctgaccctgagccagagcttatagatagtaccaagctgattgaggtacaagttgttctcatattggcctactgctccatcatcttgcttggggtaattggcaactccttggtgatccatgtggtgatcaaattcaagagcatgcgcacagtaaccaactttttcattgccaatctggctgtggcagatcttttggtgaacactctgtgtctaccgttcactcttacctataccttaatgggggagtggaaaatgggtcctgtcctgtgccacctggtgccctatgcccagggcctggcagcacaagtatccacaatcaccttgacagtaattgccctggaccggcacaggtgcatcgtctaccacctagagagcaagatctccaagcgaatcagcttcctgattattggcttggcctggggcatcagtgccctgctggcaagtcccctggccatcttccgggagtattcgctgattgagatcattccggactttgagattgtggcctgtactgaaaagtggcctggcgaggagaagagcatctatggcactgtctatagtctttcttccttgttgatcttgtatgttttgcctctgggcattatatcattttcctacactcgcatttggagtaaattgaagaaccatgtcagtcctggagctgcaaatgaccactaccatcagcgaaggcaaaaaaccaccaaaatgctggtgtgtgtggtggtggtgtttgcggtcagctggctgcctctccatgccttccagcttgccgttgacattgacagccaggtcctggacctgaaggagtacaaactcatcttcacagtgttccacattatcgccatgtgctccacttttgccaatccccttctctatggctggatgaacagcaactacagaaaggctttcctctcggccttccgctgtgagcagcggttggatgccattcactctgaggtgtccgtgacattcaaggctaaaaagaacctggaggtcagaaagaacagtggccccaatgactctttcacagaggctaccaatgtctaaggaagctgtggtgtgaaaatgtatggatgaattctgaccagagctatgaatctggttgatggcggctcacaagtgaaaactgatttcccattttaaagaagaagtggatctaaatggaagcatctgctgtttaattcctggaaaactggctgggcagagcctgtgtgaaaatactggaattcaaagataaggcaacaaaatggtttacttaacagttggttgggtagtaggttgcattatgagtaaaagcagagagaagtacttttgattattttcctggagtgaagaaaacttgaacaagaaattggtattatcaaagcattgctgagagacggtgggaaaataagttgactttcaaatcacgttaggacctggattgaggaggtgtgcagttcgctgctccctgcttggcttatgaaaacaccactgaacagaaatttctccagggagccacaggctctccttcatcgcattttgatttttttgttcattctctagacaaaatccatcaggggaatgctgcaggaaacgattgccaactatacgaatggcttcgaggagataaactgaaatttggctatataattaatattttggcagatgataggggaactcctcaacactcagtgggccaattgttcttaaaaccaattgcacgtttggtgaaagtttcttcaactctgaatcaaaagctgaaattctcagaattacaggaaatgcaaaccatcatttaatttctaatttcaagttacatccgctttatggagatactatttagataacaagaatacaacttgatacttttattgttatacctttttgaacatgtatgatttctgttgttattcctattggagctaagtttgtctacactaaaatttaaatcagactagagaataatttttgtggcatgttgtaacatttcacagtatttacaagctatttttgcacaggtacatagctctcatgtatttaaagaacactgcagtgttattttctttgaaattcatcctccacggacccattcatactaaataaaacaatgtaattacattaaaatggacctatctgtaagaggtactaaaaacactggattcatttcatcttgcaaatgttgtatttcaaaccagtttcacataagttatttgtcttcttttcaaaataattagctatatttttatataatatgaatatatacataaaaattgtttctataaattgtagaacatagatgctacagtattttttatttaattatattatgaataaaattgttatttcaatagtacccaaccaaagatgcttaaaaaccttcttatgttcataaaaaataacaactgagatgttaaaatagtcatacgtctttagatgctattaaagtttcattagtcatatttttgtaaatatgacagaatttgtgaatatatttttaaagcaaaaaacttcaacatgcatatgatatatagttacaacattaattttatgaactggagagctttactttgtggatatatttaaaattcatattatagctcctattaaattccttccatgatagatataaaggactggtttttaagtgcactgcacttctggaatactgaaaaagaatgaaaacaatatgttagattaggtgtaagactttaagaagcgaacaaaaagtaatgtatatctgtaatatataatcaaatgattcatttttctgttagactaggcaaattgttcaaaaataacctttttgtcttttaagtagcagtcactttgcttaagatgctaatagaaaactgtggttaaagatttaccctccctcttggtgaattattacactgtaagaaatgtatatgctactgtgttacatgttgtattagtaaattattagaatccaattaatgattcaattaacatatatcttatccaattcattatgtcaattcatcaataaaataccttttatgtagaggctttatgttgcaattaaaaagttgggaaaatgagaaaaaaaaaaa

SEQ ID NO: 356 - DNA, 1015 bp, Homo sapiens
ggcacgagggtggagctaccgccaccgccgccgccgattccggagccggggtagtcgccgccgccgccgccgctgcagccactgcaggcaccgctgccgccgcctgagtagtgggcttaggaaggaagaggtcatctcgctcggagcttcgctcggaagggtctttgttccctgcagccctcccacgggaatgacaatggataaaagtgagctggtacagaaagccaaactcgctgagcaggctgagcgatatgatgatatggctgcagccatgaaggcagtcacagaacaggggcatgaactctccaacgaagagagaaatctgctctctgttgcctacaagaatgtggtaggcgcccgccgctcttcctggcgtgtcatctccagcattgagcagaaaacagagaggaatgagaagaagcagcagatgggcaaagagtaccgtgagaagatagaggcagaactgcaggacatctgcaatgatgttctggagctgttggacaaatatcttattcccaatgctacacaaccagaaagtaaggtgttctacttgaaaatgaaaggagattattttaggtatctttctgaagtggcatctggagacaacaaacaaaccactgtgtcgaactcccagcaggcttaccaggaagcatttgaaattagtaagaaagaaatgcagcctacacacccaattcgtcttggtctggcactaaatttctcagtcttttactatgagattctaaactctcctgaaaaggcctgtagcctggcaaaaacggcatttgatgaagcaattgctgaattggatacgctgaatgaagagtcttataaagacagcactctgatcatgcagttacttagggacaatctcactctgtggacatcggaaaaccagggagacgaaggagacgctggggagggagagaactaatgtttctcgtgctttgtgatctgttcagtgtcactctgtaccctcaacatatatcccttgtgcgataaaaaaaaaaaaaaaaaa

SEQ ID NO: 357 - DNA, 2161 bp, Homo sapiens
cggcccagtgatcttgaaccccaaaggccagaactggagcctcagtccagagaattctgagaaaattaaagcagagaggaggggagagatcactgggaccaggccgtgatctctatgcccgagtctcaaccctcaactgtcaccccaaggcacttgggacgtcctggacagaccgagtcccgggaagccccagcactgccgctgccacactgccctgagcccaaatgggggagtgagaggccatagctgtctggcatgggcctctccaccgtgcctgacctgctgctgccgctggtgctcctggagctgttggtgggaatatacccctcaggggttattggactggtccctcacctaggggacagggagaagagagatagtgtgtgtccccaaggaaaatatatccaccctcaaaataattcgatttgctgtaccaagtgccacaaaggaacctacttgtacaatgactgtccaggcccggggcaggatacggactgcagggagtgtgagagcggctccttcaccgcttcagaaaaccacctcagacactgcctcagctgctccaaatgccgaaaggaaatgggtcaggtggagatctcttcttgcacagtggaccgggacaccgtgtgtggctgcaggaagaaccagtaccggcattattggagtgaaaaccttttccagtgcttcaattgcagcctctgcctcaatgggaccgtgcacctctcctgccaggagaaacagaacaccgtgtgcacctgccatgcaggtttctttctaagagaaaacgagtgtgtctcctgtagtaactgtaagaaaagcctggagtgcacgaagttgtgcctaccccagattgagaatgttaagggcactgaggactcaggcaccacagtgctgttgcccctggtcattttctttggtctttgccttttatccctcctcttcattggtttaatgtatcgctaccaacggtggaagtccaagctctactccattgtttgtgggaaatcgacacctgaaaaagagggggagcttgaaggaactactactaagcccctggccccaaacccaagcttcagtcccactccaggcttcacccccaccctgggcttcagtcccgtgcccagttccaccttcacctccagctccacctatacccccggtgactgtcccaactttgcggctccccgcagagaggtggcaccaccctatcagggggctgaccccatccttgcgacagccctcgcctccgaccccatccccaacccccttcagaagtgggaggacagcgcccacaagccacagagcctagacactgatgaccccgcgacgctgtacgccgtggtggagaacgtgcccccgttgcgctggaaggaattcgtgcggcgcctagggctgagcgaccacgagatcgatcggctggagctgcagaacgggcgctgcctgcgcgaggcgcaatacagcatgctggcgacctggaggcggcgcacgccgcggcgcgaggccacgctggagctgctgggacgcgtgctccgcgacatggacctgctgggctgcctggaggacatcgaggaggcgctttgcggccccgccgccctcccgcccgcgcccagtcttctcagatgaggctgcgcccctgcgggcagctctaaggaccgtcctgcgagatcgccttccaaccccacttttttctggaaaggaggggtcctgcaggggcaagcaggagctagcagccgcctacttggtgctaacccctcgatgtacatagcttttctcagctgcctgcgcgccgccgacagtcagcgctgtgcgcgcggagagaggtgcgccgtgggctcaagagcctgagtgggtggtttgcgaggatgagggacgctatgcctcatgcccgttttgggtgtcctcaccagcaaggctgctcgggggcccctggttcgtccctgagcctttttcacagtgcataagcagttttttttgtttttgttttgttttgttttgtttttaaatcaatcatgttacactaatagaaacttggcactcctgtgccctctgcctggacaagcacatagcaagctgaactgtcctaaggcaggggcgagcacggaacaatggggccttcagctggagctgtggacttttgtacatacactaaaattctgaagtt

SEQ ID NO: 358 - DNA, 1440 bp, Homo sapiens
atggcgggcggagaagctggagtgactctagggcagccgcatctttcgcgtcaggatctcaccaccttggatgttaccaagttgacgccactttcacatgaagttatcagcagacaagccacaattaacataggtacaattggtcatgtagctcatgggaaatccacagtcgtcaaagctatttctggagttcatactgtcaggttcaaaaatgaactagaaagaaatattacaatcaagcttggatatgctaatgctaagatttataagcttgatgacccaagttgccctcggccagaatgttatagatcttgtgggagcagtacacctgacgagtttcctacggacattccagggaccaaagggaacttcaaattagtcagacatgtttcctttgttgactgtcctggccacgatattttgatggctactatgctgaacggtgcagcagtgatggatgcagctcttctgttgatagctggtaatgaatcttgccctcagcctcagacatcggaacacctggctgctatagagatcatgaaactgaagcatattttgattctacaaaataaaattgatttggtaaaagaaagtcaggctaaagaacaatacgagcagatccttgcatttgtccaaggtacagtagcagagggagctcccattattccaatttcagctcagctgaaatacaatattgaagttgtttgtgagtacatagtaaagaaaattccagtacccccaagagactttacttcagagccccggcttattgttattagatcttttgatgtcaacaaacctggctgtgaagttgatgaccttaagggaggtgtagctggtggtagtatcctaaaaggagtattaaaggtgggccaggagatagaagtaagacctggtattgtttccaaagatagtgaaggaaaactcatgtgtaaaccaatcttttccaaaattgtatcactttttgcggagcataatgatctgcaatatgctgctccaggcggtcttattggagttggaacaaaaattgaccccactttgtgccgggctgacagaatggtggggcaagtacttggtgcagtcggagctttacctgagatattcacagaattggaaatttcctatttcctgcttagacggcttctaggtgtacgcactgaaggagacaagaaagcagcaaaggttcaaaagctgtctaagaatgaagtgctcatggtgaacataggatccctgtcaacaggagggagagttagtgctgtcaaggccgatttgggtaaaattgttttgaccaatccagtgtgcacagaggtaggagaaaaaattgcccttagccgaagagttgaaaaacactggcgtttaattggttggggtcagataagaagaggagtgacaatcaagccaacagtagatgatgactgaagaataccagttaaataatac

SEQ ID NO: 359 - DNA, 1811 bp, Homo sapiens
  misc_feature (951)..(951): n is a, c, g, or t
  misc_feature (1124)..(1124): n is a, c, g, or t
atggggacctgtgacattgtgactgaagccaatatctcatctggccctgagagcaacaccacgggcatcacagccttctccatgcccagctggcagctggcactgtgggcaccagcctacctggccctggtgctggtggccgtgacgggtaatgccatcgtcatctggatcatcctggcccatcggaggatgcgcacagtcaccaactacttcatcgtcaatctggcgctggctgacctctgcatggctgccttcaatgccgccttcaactttgtctatgccagccacaacatctggtactttggccgtgccttctgctacttccagaacctcttccccatcacagccatgtttgtcagcatctactccatgaccgccattgctgccgacaggtacatggccatcgtccaccccttccagcctcggctttcagctcccagcaccaaggcggttattgctggcatctggctggtggctctcgccctggcctcccctcagtgcttctactccaccgtcaccatggaccagggtgccaccaagtgcgtggtggcctggcccgaagacagcgggggcaagacgctcctcctgtaccacctcgtggtgatcgccctcatctacttcctgccgctcgcggtgatgtttgtagcctacagcgtcatcggcctcacgctctggaggcgcgcagtgcccggacatcaggcgcacggtgccaacctccgccatctgcaggccaagaagaagtttgtgaagaccatggtgctggtggtgctgacgtttgccatctgctggctgccctaccacctctacttcatcctgggcagcttccaggaggacatctactgccacaagttcatccagcaagtctacctggcactcttctggttggccatgagctctaccatgtacaatcccatcatctactgctgtctcaaccacaggtttcgctctggnttccggcttgccttccgctgctgcccatgggtcacacccaccaaggaagataagctcgagctgactcccacgacctccctctccacgagagtcaacaggtgtcacactaaggagactttgttcatggctggggacacagccccctccgaggctaccagtggggaggcggggcntccccaggatggatcagggctatggtttgggtatggtttgcttgcccccaccaaaactcatgttgaaatttgatcccaatgtggcagtgttgggaggtaggggttagtgggaggtgtttgggtattggggatggatcccttatgaatagattaatgccttccagttgaagtgaatcatcactcttgtgggaatggactagttcccaaaataacaagttgttagaaagagtgtggtgtcctcagtttccctgtcttgcttcctctctcaccatgtgatctctttgcacacaacacttcccttccactttccaccatgacaagaagcagcctgaggccttcaccagatgcagctgcccaatcttggatattccagccaccagaatcatgagccaaataaacctcttttctttataaattacctagtctcaggtattccatgaaagcaacacaaatggactgagataggtgcctattgaaccctgaagccttgtgcctggctgcagaatgaggtgtagcaccctttgagaagtagccaatcgagaagaccacatctgaaagttcagtcatgccccatccttcagtataccaatacaaagacaacatggggcagaactccagaaggatgctgactttaagaggactcaggcaccatctcagagagcacttcggaggatcagtagggtcgaa

SEQ ID NO: 360 - DNA, 1737 bp, Homo sapiens
agaagctggtggcaacttcactggggagatattgcaaataacagcgggaacatgaagccgccactcttggtgtttattgtgtgtctgctgtggttgaaagacagtcactgcgcacccacttggaaggacaaaactgctatcagtgaaaacctgaagagtttttctgaggtgggggagatagatgcagatgaagaggtgaagaaggctttgactggtattaagcaaatgaaaatcatgatggaaagaaaagagaaggaacacaccaatctaatgagcaccctgaagaaatgcagagaagaaaagcaggaggccctgaaacttctgaatgaagttcaagaacatctggaggaagaagaaaggctatgccgggagtctttggcagattcctggggtgaatgcaggtcttgcctggaaaataactgcatgagaatttatacaacctgccaacctagctggtcctctgtgaaaaataagattgaacggtttttcaggaagatatatcaatttctatttcctttccatgaagataatgaaaaagatctccccatcagtgaaaagctcattgaggaagatgcacaattgacccaaatggaggatgtgttcagccagttgactgtggatgtgaattctctctttaacaggagttttaacgtcttcagacagatgcagcaagagtttgaccagacttttcaatcacatttcatatcagatacagacctaactgagccttacttttttccagctttctctaaagagccgatgacaaaagcagatcttgagcaatgttgggacattcccaacttcttccagctgttttgtaatttcagtgtctctatttatgaaagtgtcagtgaaacaattactaagatgctgaaggcaatagaagatttaccaaaacaagacaaagctcctgaccacggaggcctgatttcaaagatgttacctgggcaggacagaggactgtgtggggaacttgaccagaatttgtcaagatgtttcaaatttcatgaaaaatgccaaaaatgtcaggctcacctatctgaagactgtcctgatgtacctgctctgcacacagaattagacgaggcgatcaggttggtcaatgtatccaatcagcagtatggccagattctccagatgacccggaagcacttggaggacaccgcctatctggtggagaagatgagagggcaatttggctgggtgtctgaactggcaaaccaggccccagaaacagagatcatctttaattcaatacaggtagttccaaggattcatgaaggaaatatttccaaacaagatgaaacaatgatgacagacttaagcattctgccttcctctaatttcacactcaagatccctcttgaagaaagtgctgagagttctaacttcattggctacgtagtggcaaaagctctacagcattttaaggaacattttaaaacctggtaagaagatctaatgcatcctatatccagtaagtagaattatctcttcatctgggacctggaaatcctgaaataaaaaaggataatgcaataaacacagttgcaggaaagtatgttagctatatactatgaagtactcttagtttacttatgttgaatggcttagctattaatactcaaattgagttaaaatgaaaattcctccttaaaaaatcaaacgtaatatgtattacatttcatggtacattagtagttctttgtatattgaataaatactaaatcacctaaa

SEQ ID NO: 361 - DNA, 2045 bp, Homo sapiens
ggggacctttagaattttgatagcaatttctttgaatctgtagattactttgtgtagtattgccatcttaacaatattaaatcttccagccaggcgccagtggctcaagcctgtaatctcagcattttgggaagccaaggtaggcagatcacttgagcacaggagtttgagacccccccgagcaacatggcgaagcctgtctctacaaaaaataaaaaatcagccaggtgtggtggtgcacgcctgttgtcccagtgctccagcctggctgacagaggcagaccttgtctcaaaaaaaaccaaaactaatattaagtcttccaatccatgaacaaggatatattttcatttatttagatcttttaaaatgtgtttcagcagtgtttttgttcatttgtgtgtttgtttttagttttctatatacaaatttcttcctgggtattttattctttttgatgctcttaaagggaattttctcaattttctttttggattgttcattgggtatgatgttagctgtgggtatttcatgaataccttgctttacatatttttaatgcagtgttttttggtgtgtaagattttgactcctgtatcttctgggtggattaaaatttgtattataaatgatattaaatgtatctgactctgaggctttttcttaatgtgcattttcttcttatatcttgcccagctaatttttgtatttttggtagagacagggtttcaccatgttggccaggatgtcttgatctcttgacctcgtgatctgcctgcctcagcctcccaaagtgctgggattacaggcgtgagccaccatgcctggcagcctcccttgtatttctaacagcttttgctgtctatattttttaattaaggtgaaattcttgtaacaaaaagctaaccatttaaaaatatacaattcaacagcatttactacattcaaaatgttcacaaatacctcctctatgtggttccaaaacatttcattttgaaactacaaaataggatccattaagctgcccctccctattctccgctccactatctcctggcaaccaccaatttccttcctgtctctgaatttacccgttctggatatttcgtataaatggcatcatagaatgtgtgaccttttgtgtcaggcttttttcacttagcataatgttttacaggttcatctatattgtagcatgtgtcagtagttcattcatttgtggctgagtaatattctgttatatgtatttaccacattttgcttagccattcatctgttgatgatatacatataacagaatattactgtggattgattccaccttttggctattgtaaatagcactccttcaacatttgtgtacaagtatttgttggagtacctgtttttaattctttaggggtgtatatttaggagtggaatttctgagtcatcttgtaattctatgtgtaactttggaggaatttccaaactgttttctgcaatggctgcaccattttacattcctgtcagcaatgtacaggattccagtttctccatatccctgccaacacttggtattttcctttttttcagttagttactctagtgggtatgtggtggttgtcccattgctgtttgttttgattttcattgtccctaatgactaatgatattgagcatctaatatccagttgtcccagcaacatttgtttgaagagactattctttcctgtgtaaatggtcttggcatctttgttgaaaatcgattggcagccaggtgcagtagctcacacctgtaatcccagcactttgggaggctgcgctgggcagatcgcttaagctcaggagtttgagtccagcctgggcaacgtggcaaaaccatgtctctactaaaaatacacaaattagccaggcatgatggcacgtgcctgtagtcccagctacttgggggactgaggccggaggatcacttgagcctgggaggcagcggttgcagtgagccaagattgcaccattgcactccagcatgggcgaacacagtgagaccctgtctccaaaaaaaaaa

SEQ ID NO: 362 - DNA, 1342 bp, Homo sapiens
  misc_feature (1058)..(1058): n is a, c, g, or t
actcaaactcctctctctgggaaaacgcggtgcttgctcctcccggagtggccttggcagggtgttggagccctcggtctgccccgtccggtctctggggccaaggctgggtttccctcatgtatggcaagagctctactcgtgcggtgcttcttctccttggcatacagctcacagctctttggcctatagcagctgtggaaatttatacctcccgggtgctggaggctgttaatgggacagatgctcggttaaaatgcactttctccagctttgcccctgtgggtgatgctctaacagtgacctggaattttcgtcctctagacgggggacctgagcagtttgtattctactaccacatagatcccttccaacccatgagtgggcggtttaaggaccgggtgtcttgggatgggaatcctgagcggtacgatgcctccatccttctctggaaactgcagttcgacgacaatgggacatacacctgccaggtgaagaacccacctgatgttgatggggtgataggggagatccggctcagcgtcgtgcacactgtacgcttctctgagatccacttcctggctctggccattggctctgcctgtgcactgatgatcataatagtaattgtagtggtcctcttccagcattaccggaaaaagcgatgggccgaaagagctcataaagtggtggagataaaatcaaaagaagaggaaaggctcaaccaagagaaaaaggtctctgtttatttagaagacacagactaacaattttagatggaagctgagatgatttccaagaacaagaaccctagtatttcttgaagttaatggaaacttttctttggcttttccagttgtgacccgttttccaaccagttctgcagcatattagattctagacaagcaacacccctctggagccagcacagtgctcctccatatcaccagtcatacacagcctcattattaaggtcttatttaatttcagagtgtaaattttttcaagttgctcattaggttttataaacaagaagcctacatttttggccccttaanacacctaccttacagtgttatgaccttgtatacacatatattggtatcaaaggggataaaagcccaatttgtctgttacatttcctttcacgtatttcttttagcagcacttctgctactaaagttaatgtgtttactctctttccttcccacattctcaattaaaaggtgagctaagcctcctcggtgtttctgattaacagtaaatcctaaattcaaactgttaaatgacatttttatttttatgtctctccttaactatgagacacatcttgttttactga

SEQ ID NO: 363 - DNA, 1778 bp, Homo sapiens
gaattccggttacgtctgccccccggtggcaaattcccggattaaaaggttccctggttgtgaaaatacatgagataaatcatgaaggccactatcatcctccttctgcttgcacaagtttcctgggctggaccgtttcaacagagaggcttatttgactttatgctagaagatgaggcttctgggataggcccagaagttcctgatgaccgcgacttcgagccctccctaggcccagtgtgccccttccgctgtcaatgccatcttcgagtggtccagtgttctgatttgggtctggacaaagtgccaaaggatcttccccctgacacaactctgctagacctgcaaaacaacaaaataaccgaaatcaaagatggagactttaagaacctgaagaaccttcacgcattgattcttgtcaacaataaaattagcaaagttagtcctggagcatttacacctttggtgaagttggaacgactttatctgtccaagaatcagctgaaggaattgccagaaaaaatgcccaaaactcttcaggagctgcgtgcccatgagaatgagatcaccaaagtgcgaaaagttactttcaatggactgaaccagatgattgtcatagaactgggcaccaatccgctgaagagctcaggaattgaaaatggggctttccagggaatgaagaagctctcctacatccgcattgctgataccaatatcaccagcattcctcaaggtcttcctccttcccttacggaattacatcttgatggcaacaaaatcagcagagttgatgcagctagcctgaaaggactgaataatttggctaagttgggattgagtttcaacagcatctctgctgttgacaatggctctctggccaacacgcctcatctgagggagcttcacttggacaacaacaagcttaccagagtacctggtgggctggcagagcataagtacatccaggttgtctaccttcataacaacaatatctctgtagttggatcaagtgacttctgcccacctggacacaacaccaaaaaggcttcttattcgggtgtgagtcttttcagcaacccggtccagtactgggagatacagccatccaccttcagatgtgtctacgtgcgctctgccattcaactcggaaactataagtaattctcaagaaagccctcatttttataacctggcaaaatcttgttaatgtcattgctaaaaaataaataaaagctagatactggaaacctaactgcaatgtggatgttttacccacatgacttattatgcatgttatgatcagtagttgattttgagaaagctctatgagctctaagtaactgcatggttttttgtttaatgtaatataggagacccttcacattcccaaggaatatattccaaaacatttttgtgaatatctaagtttgtgaaactactagggcatgatacagtaaggtgtaattacagaatttacgaaatgtaaatgacctctacagagttttatggaatacctggtactaacgtaggcagctgcaaaaccacactgagttacagctgtcagccctcctcattcctaaataacttgccttacatatcagccctcccacttctgaagttcaaattagtgcctcggaaatgtagaatttattatttgtcatttttttttttttagcatagattgagaacagttgaactcttaaatcctcagatgccaggggtctgctctagcatcagtaagtatttagcagaaactaactccgtaatgaatggaattc

SEQ ID NO: 364 - DNA, 2150 bp, Homo sapiens
cgcttagaactgtgttgagctctcacccatcacgatgagcaacaaattcctgggcacctggaaacttgtctctagcgagaactttgacgattacatgaaagctctgggtgtggggttagccaccagaaaactgggaaatttggccaaacccactgtgatcatcagcaagaaaggagatattataactatacgaactgaaagtacctttaaaaatacagaaatctccttcaagctaggccaggaatttgaagaaaccacagctgacaatagaaagaccaagagcatcgtaaccctgcagagaggatcactgaatcaagtgcagagatgggatggcaaagagacaaccataaagagaaagctagtgaatgggaaaatggtagcggaatgtaaaatgaagggcgtggtgtgcaccagaatctatgagaaggtctgaaaaatcatttcttcattgaagtggctttttatcatttaatgatggaaatcaattgcttccattgacaaaactgaatacactgcaaatatttgtttttgcttttgtcttaatatatcagatatgcaaaggcctaaactgagaattaatctaaaagtcagtgttatttaaacattttcaatgtgcatgcatgtcattattacatcaaagcatatatattggccagacacaaacagttgatgatgtcattcaattaactacaaaattctaatctatgttgaactttgtatacttgaaatgataataaaaaggatataatttcttagtaaaatgaaatcaaagtattgatcagggtagcaaactcaaatgctgacaggggccagaggagatatggggaaggagcatcagaaatgaggcaagctaggagaatgggctattataatgtaaagaattgtagtctcagttaaaaggggtagcctctactccagccaacattttaaaattaatggataatttatagacagttaaatttatagacagttaagtaaaaatggataatttatagacagataatttatagacaggtaaatgtgagttaaatataactcacatcccactcaagacacaaaacattttcttaatcctagtacatttttttctgtcccttcccaatcagtgtccttttctgttccacccctaccaaaagcaagtagtggtttggtttctatcatatagattaattttacctgctcatatgaagggaattgtacatcatgcattcttttctgtttgccttttttaaattcagcatcatgtttttgtgatacatccacattgttgcatgcagctgtagtttgtttctttttattaccaagtactatttcattgtatgaatatatcacagtttatccattctactattaagacaattgagctatttctaattttcggctgctatgaataaagctgctacaaatatttttgtacaagactttttgtaaacataggagtccctttattttaaataaataactagtcatatcattaggtccagtaattgttgacaggcaggaacgggggaccattgcattgtgcccaagtaataataaaactatttcagatgtattatatgattgagcaaatgagaaaacatgttgatgttgatgggagtcaggatgttcactatggaaaaacaaatatacaaatatgaaatgagggaaggcaagaaagaaccatgtggaaatggaatagaattggtataaattcataatttctaaaccatgtatatgtacgtttatatgtattataattgcatacacatgcctccatgcatatatgtgtgtgataatacacatgcatttatgtgcgtgtgtgtatacacatgcatatatttactaatcctatctgccaaaatggcttagacacaaaaacacctcagcagaaatgaatatacctagcactcagatcttcgtgtctaatatagtttgccactaaaaggaaccaaggctacttggaaaaatggatgattccaaagcaagggcaaggtaggaacaagatgagcttgaaatatcttgttatgccagaaagtaatgttaaaaaaaaaaaatagaggtatattgccaaaacatagagccagcttgaaggggctcccactggccaaacttgagccaatctgagagcaaaataattgagaaaaataaataacaagataattgaaaaa

SEQ ID NO: 365 - DNA, 4210 bp, Homo sapiens
atggcggccggcaagagcggcggtagcgcaggggagattacttttctggaagctttggctagatcagagtctaagagagatggaggttttaaaaataattggagctttgatcatgaagaagaaagtgaaggagatacagataaagatgggacaaatctgctcagtgtggatgaagatgaggattctgaaacctcaaaaggaaaaaagttaaatcgtcgatctgaaattgttgctaatagctctggtgaattcatcttgaagacatatgtaagacgaaacaagtctgaaagttttaaaactttgaaaggcaacccaattggacttaacatgttgagcaacaataagaaattgagtgaaaatatgcaaaatacgtcattatgttctggaactgtagttcatggtagacgttttcatcatgctcatgcacagataccagtagtaaaaacagcagcccaaagcagtctggaccgaaaagaaaggaaagaatacccacctcatgtccaaaaagttgaaattaatcctgtaaggttaagtcggctccaaggtgttgaacgtataatgaagaaaacagaagagtccgaatcacaagtggagcctgaaattaagaggaaagtacaacagaaacggcactgtagtacctatcagcctactcctcctctatctcctgcttcaaaaaaatgtttaacccatttagaggatttgcaaagaaattgcagacaagctattactttgaatgagtctactggaccattattaagaacgtcaattcatcagaattctggaggacagaagtcacaaaacacaggattaacaaccaagaagttttatggcaacaatgtggaaaaggttccaattgatattattgtgaattgtgatgacagtaaacacacttatttacagactaatggaaaagtcattttacctggggcaaaaatacccaaaatcacaaacttgaaagaaaggaaaacaagtttgtcagacctaaatgatccaatcattttgtccagtgatgatgatgatgacaacgacagaactaacagaagagaaagcatatctcctcagcctgctgattcagcatgttcttcccctgcaccatccactggaaaagtagaagcagcactaaatgaaaatacttgcagagcagagcgtgaactacgaagcattccagaagactcagagttaaatacagttacattgccaagaaaagcaagaatgaaagaccagtttggcaattctattatcaacacacctctgaaacgtcgtaaagtgttttctcaagaacctccagatgctttagctttaagctgccaaagttcctttgacagtgtcattttaaactgtcgaagtatacgagtaggaacactcttccggctgttaatagagcctgtaattttttgtttagattttatcaagatacagctagacgaaccagaccatgatcctgtagagattatattaaatacctctgatctaactaaatgtgaatggtgtaatgtccgaaaattacctgtagtgtttcttcaagcaattccagcagtttatcaaaagctgagcatccaactgcaaatgaataaggaggataaagtttggaatgattgtaaaggagtaaataaattaacaaatttagaagaacaatatataattttaatttttcaaaatggccttgatcctccggcaaatatggtatttgaaagtatcattaatgaaattggtataaagaataacatctccaatttttttgcgaaaattccctttgaagaagctaatggcagacttgttgcctgtacaagaacctatgaagagagcatcaaaggaagttgtgggcaaaaggaaaacaaaattaaaactgtatcatttgaatctaaaatacaacttagaagcaaacaagaatttcagttttttgatgaagaagaagaaactggagaaaaccacaccatcttcattggcccagtagaaaagttgatagtatatccaccacctccagctaagggaggcatctctgttaccaatgaggacctgcactgtctaaatgaaggagaatttttaaatgatgttattatagacttttatttgaaatacttggtgcttgaaaaactgaagaaggaagacgctgaccgaattcatatattcagttcttttttctataaacgccttaatcagagagagaggagaaatcatgaaacaactaatctgtcaatacagcaaaaacggcatgggagagtaaaaacatggacccggcacgtagatatttttgagaaggattttatttttgtaccccttaatgaagctgcacactggtttttggctgttgtttgtttccccggtttggaaaaaccaaagtatgaacctaatcctcattaccatgaaaatgctgtcatacagaaatgttcaactgtagaggacagttgtatttcttcttcagccagtgaaatggagagttgttcacaaaactcttctgccaagcctgtaattaagaagatgctaaacaaaaaacattgcatagctgtaattgattccaatcctgggcaggaagaaagtgaccctcgttataagagaaacatatgcagtgtaaaatacagtgtgaaaaaaataaatcatactgcgagtgaaaatgaagaattcaataaaggagaatctacatcccagaaagttgctgataggactaaaagtgagaatggcctacagaatgaaagtttaagttccacacatcatacagatggcttaagcaaaatcagactaaactatagcgatgaatcacctgaagctggtaaaatgcttgaagatgaactcgtcgacttctcagaagatcaggataaccaggatgatagcagtgacgatggattcctcgctgatgacaactgcagttcagaaataggacagtggcatttaaagcctactatctgtaaacaaccttgtatcctacttatggactcactccgaggcccttctcggtcaaatgttgtcaaaattttaagagagtatttagaagtggaatgggaagttaaaaaaggaagcaaaagaagtttttccaaagatgttatgaagggctctaatccaaaagtaccacagcaaaacaacttcagtgactgtggtgtatatgtattgcagtatgtagagagcttttttgagaatccaattctcagttttgaactacctatgaatttggcaaactggtttcctccaccaagaatgagaacaaaaagagaagaaatccgaaacataattctgaagctacaggaagatcagagcaaagagaaaagaaagcataaggacacttactcaacagaagcacctttaggcgaaggaacagaacaatgtgtcaatagtatctcagattgaccatttctgttacttgtcatttctactttcagaaactaaatgactttcaaatttgggtatagacaataaagaactgaagtgctcactactcagtgatttggaaattttgatgcttgtataaatgtcagataattaatttccaaaggcgtatgtattaagtaaaagtctgtaaatatgttaatgaggccaatttttccagcatttataattatttttttcacttgttaggaagcttttgttatgtattttctgttaatagtacctaaaattgcaacttctaaacccaaataaaaagaaaatatttataggaggaaatgattaatttgatattctttagtgaacttgtttaattcctcagtgggtgtgacatatttcatgggaatattcaaatatctatggtaatattttgaccctttatatttgttctaaaataagtcaaaatgtgaaaataatattaaatctaagatattttgaactaagcatctttatatgcttgtgtaacaggaacaaagtaacagcctttcaattcatatactgccttgtgttcagtgaacccaagaaatgtaataaatatttgtaattttacacaaatatttaagaggaaagagtattaagagcaattcaaaaaaagtaaccttatactactaaaaaaaaaattcttgcatatattatcatcaaatgcatttttgaagacatcaaagactcaggttaaaactattttggtaagtgcagcttgaatttcaaatatcccgtgttacctttctctattacagcttaaagtatgctacaatctgtgtcatatagttaattgataagcatttttaatctgtgtaaacacaggaatttaaataggaatttactatttttttat

SEQ ID NO: 366 - DNA, 3068 bp, Homo sapiens
gaagtccctatcagattacacttggttgactactccggagcagccactaagagggatgaacaggcctgcgtggaaattgaatgagattagttgagtccacgctccatgagaatgctgaacaccatccaaagcagcaaattgagattccttgatttggggaagaggtttgggaggaacccttcaataattggcatgggacaagaggggacccagtccaagtgtatttgggactcgcagtagggaggaacaattcagagagagcttggaagctcgaagtctggctgtggccatgggagatacagtagtggagcctgcccccttgaagccaacttctgagcccacttctggcccaccagggaataatggggggtccctgctaagtgtcatcacggagggggtcggggaactatcagtgattgaccctgaggtggcccagaaggcctgccaggaggtgttggagaaagtcaagcttttgcatggaggcgtggcagtctctagcagaggcaccccactggagttggtcaatggggatggtgtggacagtgagatccgttgcctagatgatccacctgcccagatcagggaggaggaagatgagatgggggccgctgtggcctcaggcacagccaaaggagcaagaagacggcggcagaacaactcagctaaacagtcttggctgctgaggctgtttgagtcaaaactgtttgacatctccatggccatttcatacctgtataactccaaggagcctggagtacaagcctacattggcaaccggctcttctgctttcgcaacgaggacgtggacttctatctgccccagttgcttaacatgtacatccacatggatgaggacgtgggtgatgccattaagccctacatagtccaccgttgccgccagagcattaacttttccctccagtgtgccctgttggttggggcctattcttcagacatgcacatttccactcaacgacactcccgtgggaccaagctacggaagctgatcctctcagatgagctaaagccagctcacaggaagagggagctgccctccttgagcccggcccctgatacagggctgtctccctccaaaaggactcaccagcgctctaagtcagatgccactgccagcataagtctcagcagcaacctgaaacgaacagccagcaaccctaaagtggagaatgaggatgagcctgttcgactggctcctgagagagaattcatcaagtccctgatggcgatcggcaagcgggtggtcacgctccccaccaaagagcagaaaacacagaggctgatctcagagctctccctgctcaaccataagctccctgcccgagtctggctgtccactgctgggtttgaccaccacgtggtccgtgtaccccacacacaggctgttgtcctcaactccaaggacaaggctccctacctgatttatgtggaagtccttgaatgtgaaaactttgacaccaccagtgtccctgcccggatccccgagaaccgaattcggagtacgaggtccgtagaaaacttgcccgaatgtggtattacccatgagcagcgagctggcagcttcagcactgtgcccaactatgacaacgatgatgaggcctggtcggtggatgacataggcgagctgcaagtggagctccccgaagtgcataccaacagctgtgacaacatctcccagttctctgtggacagcatcaccagccaggagagcaaggagcctgtgttcattgcagcaggggacatccgccggcgcctttcggaacagctggctcataccccgacagccttcaaacgagacccagaagatccttctgcagttgctctcaaagagccctggcaggagaaagtacggcggatcagagagggctccccctacggccatctccccaattggcggctcctgtcagtcattgtcaagtgtggggatgaccttcggcaagagcttctggcctttcaggtgttgaagcaactgcagtccatttgggaacaggagcgagtgcccctttggatcaagccatacaagattcttgtgatttcggctgatagtggcatgattgaaccagtggtcaatgctgtgtccatccatcaggtgaagaaacagtcacagctctccttgctcgattacttcctacaggagcacggcagttacaccactgaggcattcctcagtgcacagcgcaattttgtgcaaagttgtgctgggtactgcttggtctgctacctgctgcaagtcaaggacagacacaatgggaatatccttttggacgcagaaggccacatcatccacatcgacttcggcttcatcctctccagctcaccccgaaatctgggctttgagacgtcagcctttaagctgaccacagagtttgtggatgtgatgggcggcctggatggcgacatgttcaactactataagatgctgatgctgcaagggctgattgccgctcggaaacacatggacaaggtggtgcagatcgtggagatcatgcagcaaggttctcagcttccttgcttccatggctccagcaccattcgaaacctcaaagagaggttccacatgagcatgactgaggagcagctgcagctgctggtggagcagatggtggatggcagtatgcggtctatcaccaccaaactctatgacggcttccagtacctcaccaacggcatcatgtgacacgctcctcagcccaggagtggtggggggtccagggcaccctccctagagggcccttgtttgagaaaccccaaaccaggaaaccccacctacccaaccatccacccaagggaaatggaaggcaagaaacacgaaggatcatgtggtaactgcgagagcttgctgaggggtgggagagccagctgtggggtccagacttgttggggcttccctgcccctcctggtctgtgtcagtattaccaccagactgactccaggactcactgccctccagaaaacagaggtgacaaatgtgagggacactggggcctttcttctccttgtaggggtctctcagaggttctttccacaggccatcctcttattccgttct

SEQ ID NO: 367 - DNA, 369 bp, Homo sapiens
atgaagcttctcacgggcctggttttctgctccttggtcctgagtgtcagcagccgaagcttcttttcgttccttggcgaggcttttgatggggctcgggacatgtggagagcctactctgacatgagagaagccaattacatcggctcagacaaatacttccatgctcgggggaactatgatgctgccaaaaggggacctgggggtgcctgggccgcagaagtgatcagcaatgccagagagaatatccagagactcacaggccatggtgcggaggactcgctggccgatcaggctgccaataaatggggcaggagtggcagagaccccaatcacttccgacctgctggcctgcctgagaaatactga

SEQ ID NO: 368 - DNA, 662 bp, Homo sapiens
  misc_feature (82)..(82): n is a, c, g, or t
  misc_feature (248)..(248): n is a, c, g, or t
  misc_feature (255)..(255): n is a, c, g, or t
  misc_feature (263)..(263): n is a, c, g, or t
  misc_feature (271)..(271): n is a, c, g, or t
  misc_feature (295)..(295): n is a, c, g, or t
  misc_feature (298)..(300): n is a, c, g, or t
  misc_feature (343)..(343): n is a, c, g, or t
  misc_feature (505)..(505): n is a, c, g, or t
  misc_feature (522)..(526): n is a, c, g, or t
  misc_feature (539)..(541): n is a, c, g, or t
  misc_feature (543)..(543): n is a, c, g, or t
ggagggacccgcagctcagctacagcacagatcagcaccatgaagcttctcacgggcctggttttctgctccttggtcctgngtgtcagcagccgaagcttcttttcgttccttggcgaggcttttgatggggctcgggacatgtggagagcctactctgacatgagagaagccaattacatcggctcagacaaatacttccatgctcgggggaactatgatgctgccaaaaggggacctgggggtgnctgggcngcagaagngatcagcnatgccagagagaatatccagagantcnnnggccatggtgcggaggactcgctggccgatcaggctgccaatnaatggggcaggagtggcaaagaccccaatcacttccgacctgctggcctgcctgagaaatactgagcttcctcttcactctgctctcaggagatctggctgtgaggccctcagggcagggatacaaagcggggagagggtacacaatgggtatctaataaantacttaagaggtggaannnnnaaaaaaaaaaaannnanggggggcccggtcccaattcgccctataggagtcgattacaatcacctgccgtcgttacacgtctgactggaaaacctgcgtacccactaatagcttgcgacatcccttttgcaactgc

SEQ ID NO: 369 - DNA, 1833 bp, Homo sapiens
ctgcactgcgaggccgacgcagctggagagaagttaggcaggtcctagggagggcaggctcgagtgctgggcccgcctccccgcgggactgtaggcccgggggctccgcctcgtcgcagcggcagaagtgatgccaccaaaaagaaatgaaaaatacaaacttcctattccatttccagaaggcaaggttctggatgatatggaaggcaatcagtgggtactgggcaagaagattggctctggaggatttggattgatatatttagctttccccacaaataaaccagagaaagatgcaagacatgtagtaaaagtggaatatcaagaaaatggcccgttattttcagaacttaaattttatcagagagttgcaaaaaaagactgtatcaaaaagtggatagaacgcaaacaacttgattatttaggaattcctctgttttatggatctggtctgactgaattcaagggaagaagttacagatttatggtaatggaaagactaggaatagatttacagaagatctcaggccagaatggtacctttaaaaagtcaactgtcctgcaattaggtatccgaatgttggatgtactggaatatatacatgaaaatgaatatgttcatggtgatgtaaaagcagcaaatctacttttgggttacaaaaatccagaccaggtttatcttgcagattatggactttcctacagatattgtcccaatgggaaccacaaacagtatcaggaaaatcctagaaaaggccataatgggacaatagagtttaccagtttggatgcccacaagggagtagccttgtccagacgaagtgacgttgagatcctcggctactgcatgctgcggtggttgtgtgggaaacttccctgggaacagaacctgaaggaccctgtggctgtgcagactgctaaaacaaatctgttggacgagctcccccagtcagtgcttaaatgggctccttctggaagcagttgctgtgaaatagcccaatttttggtatgtgctcatagtttagcatatgatgaaaagccaaactatcaagccctcaagaaaattttgaaccctcatggaatacctttaggaccactggacttttccacaaaaggacagagtataaatgtccatactccaaacagtcaaaaagttgattcacaaaaggctgcaacaaagcaagtcaacaaggcacacaataggttaatcgaaaaaaaagtccacagtgagagaagcgctgagtcctgtgcaacatggaaagtgcagaaagaggagaaactgattggattgatgaacaatgaagcagctcaggaaagcacaaggagaagacagaaatatcaagagtctcaagaacctttgaatgaagtaaacagtttcccacaaaaaatcagctatacacaattcccaaactcattttatgagcctcatcaagattttaccagtccagatatattcaagaagtcaagatctccatcttggtataaatacacttccacagtcagcacggggatcacagacttagaaagttcaactggactttggcctacaatttcccagtttactcttagtgaagagacaaacgcagatgtttattattatcgcatcatcatacctgtccttttgatgttagtatttcttgctttattttttctctgaagatgataccaaaattccttttgataattttttaagtttccagctcttcaccgaaatgttgtattcttatttcagtgtttccttccagacatttttaaggtaattggctttaaaaagagaacatattttaacaaagtttgtggacactctaaaaaataaaattgctttgtactagt

SEQ ID NO: 370 - DNA, 1799 bp, Homo sapiens; identical to SEQ ID NO: 247

SEQ ID NO: 371 - DNA, 1799 bp, Homo sapiens; identical to SEQ ID NO: 247

SEQ ID NO: 372 - DNA, 2046 bp, Homo sapiens
atggcgttcctgttacctctcatcattgtgttaatggtgaagcacagcgattcccggacgcactctctgagatattttcgcctgggcgtttcggatcccatccatggggtccctgaatttatttcggttgggtacgtggactcgcaccctatcaccacatatgacagtgtcactcggcagaaggagccacgggccccatggatggcagagaacctcgcgcctgatcactgggagaggtacactcagctgctgaggggctggcagcagatgttcaaggtggaactgaagcgcctacagaggcactacaatcactcagggtctcacacttaccagagaatgattggctgtgagctgctggaggatggaagcaccacaggatttctgcagtatgcatatgacgggcaggatttcctgatcttcaataaagacaccctctcctggctggctgtagataatgtggctcacaccatcaagcaggcatgggaggccaatcagcatgagttgctgtatcaaaagaattggctggaagaagaatgtattgcctggctaaagagattcctggagtatgggaaagacaccctacaaagaacagaatcagaaactatccctcttgtgatgaaagctgtctctgggtccattgtccttgtcattgtgctggctggagttggtgttctagtctggagaagaaggccccgagagcaaaatggagccatctaccttccaacaccagatcgatgattgcagatccctcttttccagttctccttcctctaggagccatgttatcctctgtcccccatagagtcaagcctagtgcttgaaggtcctgacgacacccacaacatacatgagagtaatgggattgagcatttatggcagcaacagaggagccacaaaatgttctttgttctttggctccaaaaagactgtcagctttcagtctcttttgatggactgttttatcagagttgactttaaatacagcttgtctcatgacacaacgcttccctacattctatttgtcaatgatgatttgcaactagttggagattctcagagcaggaaggaatcttttcaaccagagcaggaactgtcttctgcaatgccttggacttgagcctccagcctccacttgaacaccatgtgaagggaacctcagtacttcataaaatggcctttctcattcatctttcatgggaacatttattgtacaagcgctttgaatatcatgggcaccatgactgtgaccctacaggtaggattggatcactccatgagagtagccggcaggtttctacaatggcctgggaatggactgattatttttatacattttctggcctgagagaaagccaaagtcccctgctgttcacagcaaccctgcctgggagcttggaatcttggtaatctgcccggttggatctatggaggtagtctcaccctttttgtcttttgtgggaaattaagagaaataattatcagacatatcatcacctccagtggaactacagagacctggacccagctgcactattttaatgtaaaaataacagtatggccaggtgcagtggctcacgcctgtaatcccatcactttgagcagccaaggcgggcggatcacgaggtcaggagattaagaccatcctggccaatatggtgaaaccctgtctctactaaaatacaaaaaattagctgggcatggtgttgcgtgcctgtagtcccagctacttgggaggctgagacaggggaattgcttgaacccgggaggcagagattgcagtgagccgagatcacgccactgcactccagcctggcgacagagtgagactctatctcaaaataataataataataataataataataataataataataataataacagtatatttggtgtcaggagagggctcaattctcatttctgcctttcctgtgctggctcatggtagctgggcatgacttgccttcctacataggttgtcttcatacatatgcactgggaatcaataaaagcccatggtgagaatgaaaaaaaaaaaaaaaa

SEQ ID NO: 373 - DNA, 3842 bp, Homo sapiens
gccctcttgattatgtgtgccctctccgggcgcccgcgttagcggccgggtggaggtggggagggaagacgctgaggaggaggaggaggcggaggaggcggtggaggggaggtggggggaatcagcaaggacatggctcctgactcctgtgcggaacgtgagtgactgagcggcaaagcccgaatggtctctagcgaccggcccgtgtcactggaggacgaggtctcccatagtatgaaggagatgattggaggctgttgcgtttgctcagacgagagaggctgggccgagaacccgctggtttattgcgacgggcacggctgcagcgtcgcggtgcatcaagcttgctatggcattgttcaagtacccactggaccgtggttttgcaggaaatgtgaatctcaggagagagcagccagagtgagatgtgaactttgtccccataaggatggagctttaaaaagaacagataatgggggttgggcccatgtggtttgtgccctgtatattccagaggtacaatttgccaatgtttccacaatggaaccaattgttttacagtctgttccgcatgatcgttataataagacttgctacatttgtgatgaacaaggaagagaaagcaaagcagccactggtgcttgcatgacatgtaataaacatggatgtcgacaggctttccatgtaacatgcgctcagtttgccggactgctttgtgaagaagaaggtaatggtgccgataatgtccaatactgtggctactgtaaataccattttagtaagctgaaaaagagcaaacggggatctaataggtcatatgatcaaagtttaagtgattcttcctctcactctcaggataaacatcatgagaaagagaaaaaaaaatataaagagaaggacaaacacaaacagaaacacaagaagcagccagaaccatcacctgcattggttccatccttgactgttactacagaaaaaacttatacaagcactagcaacaactctatatctggatcattgaagcgcttggaagatactactgcacgatttacaaatgcaaatttccaggaagtctctgcacacacctctagtggaaaagatgtttcagagactagagggtcagagggcaaagggaagaaatcttcagctcacagctcaggtcaaaggggaagaaagcctggtggtggaagaaatccaggaacaactgtgtcagcagctagcccttttcctcaaggcagtttttcaggaactccaggcagtgtaaagtcatcttctggaagttcagtgcagtctccccaggatttcctgagctttacagactcagatctgcgtaatgacagttactctcactcccaacagtcatcagcaaccaaagatgtacataaaggagagtctggaagccaggaagggggggtaaatagttttagtaccttaattggcctcccttcaacctcagctgttacttcacagcctaaaagctttgaaaattcacctggagatttgggtaattccagccttcctacagcaggatataagcgggctcaaacttctggcatagaagaagaaactgtaaaggaaaagaaaaggaaaggaaataaacaaagtaagcatgggcctggcagacccaaaggaaacaaaaatcaagagaatgtttctcatctctcagtttcttctgcttcaccaacatcatctgtagcatcagctgcaggaagcataacaagctctagtctgcagaaatctcctacattgctcaggaatggaagtttacagagcctcagtgttggctcatctccagttggttcagaaatttccatgcagtatcggcatgatggagcttgcccaacaactacgttctcagagttgctgaatgcaatacacaacgacagaggtgacagttctacactaacaaagcaagaacttaaattcataggtatttataacagcaatgatgtagcagtatcgtttccaaatgtagtatctggctcgggatctagtactcctgtctccagctctcacttacctcagcagtcttctgggcatttgcaacaagtaggagcgctctctccctcagctgtgtcatctgcagcccctgctgttgctacaactcaggcaaatactctatctggatcttctctcagtcaggcaccatctcatatgtatggcaatagatcaaattcatcaatggcagctcttatagctcagtctgaaaacaatcaaacagatcaagatcttggagacaatagccgcaacctagttggcagaggaagctcaccccgaggaagtctctcgccacgatcccctgtaagcagcttacagattcgctatgatcaaccaggcaacagcagtttggaaaatctgcctccagtagcagccagcatagaacagcttttggagaggcagtggagtgaaggacagcaatttttactagaacagggtactcctagtgacattttaggaatgctgaagtcattacaccaacttcaagttgaaaaccgaagattagaggaacaaattaaaaacttgactgccaaaaaggaacggcttcagttattgaatgcacagctttcagtgccttttccaacaataacagcaaatcctagtccgtctcatcaaatacacacattttcagcacagactgctcctactactgattccttgaacagcagtaagagccctcatataggaaacagctttttacctgataattctcttcctgtattaaatcaggacttaacctccagtggacaaagtaccagcagctcatcagctctttctaccccacctcctgctgggcagagtccggctcaacaaggctcaggagtgagtggagttcagcaggtcaatggcgtgacagtgggggcactagctagtggaatgcagcctgtaacttccaccattcctgccgtgtctgcagtgggtggaataattggagctttgccaggtaaccaactggcaattaatggcattgtaggagctttaaatggggttatgcagactcctgtcacaatgtcccagaaccctacccctctcacccacacaaccgtaccacctaatgcaacacatccaatgccagctacactgactaacagtgcctcaggactaggattactttctgaccagcaacgacaaatacttattcatcaacagcagtttcagcagttgttaaattctcaacagctcacaccagtacacaggcacccccacttcacacagctaccaccaacccatttctcaccatccatggagataatgcaagtcagaaagtagcaagacttagtgataaaactgggcctgtagctcaagagaaaagttgacacctgagaaacatctagaaattgcctatcctgctgttctagcacttcatctggctgcctttgcagtccttttactacagctatgaagaaacgcaacaagaaactcaatgcacaacaaaggattaattgctgcaaggacattcttgtaaggctttgattagttttcttgttgctttgttgcactgaaatggaattcccatgcccctaccccttaccccagttttttgaacatggaaagaaaatttaataactttttaaagtgacataatttacatgcaatatgtttatcaactcaagaatttaatatagttggtacacaactagttttgtttataaattggagatgcaaatagcaaaactaaatacttgctccatttacaaactacttgattttattgtacaagttgaaatatgctcttttgtttgggttacagtatgcttgctctaagtcaaattccaaggaactaatttcttctcctggagttgcattgattcagtattacaaatatatagcacatcacctgggac

SEQ ID NO: 374 - DNA, 1832 bp, Homo sapiens
  misc_feature (2)..(2): n is a, c, g, or t
  misc_feature (23)..(23): n is a, c, g, or t
  misc_feature (73)..(73): n is a, c, g, or t
  misc_feature (155)..(155): n is a, c, g, or t
  misc_feature (533)..(572): n is a, c, g, or t
gnttttaaatcaataagtaatcnaggactagcattatgtttgctagacctggcatttgctcggtacataaggntcaaagtttcctttcctttttttatttattttatattttgcaatgttttttttccataatatttaagtttttcgatgtttanatatttttcttcggtgaagcacaagtttcttttcatggtccctgatcaatcagagggaaaagctcactttaaacagttggaacaccggtggcactgttaactgctttctgggcagcctctttagcttggtgggcttgtagtacagctacagcttcatcaaccttagaacggagtgactctggagactcgagcatatgaagaagttctgaattatcaatctccaacaacatgccagtgattttaccagcaagagtagggtgcatggcttgaataagaggaaacagccgttcacccaacatttgcttttgctcttgaggaggggcagatgccaacatggaagcagtcaaaggttcctgaccttgtacatgaacagcaggnnnnnnnnnnnnnnnnnnnnnnnnnnnnnnnnnnnnnnnnatgaggtctggcaccctgagcagtccagcgaggacttggtcttagttgagcaatttggctaggaggatagtatgcagcacggttctgagtctgtgggatagctgcgatgaagtaacctgaaggaggtgctggctggtaggggttgattacagggttgggaacagctcgtacacttgccattctctgcatatactggttagtgaggtgagcctggcgctcttctttgcgctgagctaaagctacatacaatggctttgtggccacaattctaccgttcatttctgtaactgctttagtggcttcttctggggaggagaaacatacaaaaccaaaccctttgctgcgaccaccctccatcataacctttgcactagtgattgtaccaaatggagaaaactctttccggagacgttcatcatcaataccatcatcaagatttttcacataaagattaacaccctggtatctggtgatcctatcttgtttcatctgttcaaatttgcgcttaagttccgtctgccgttccacctttttctgagctcgaccaacataaatttgttttccattgagctcctttccgttcatctcatccacagctttctgtgcatcttcatgcctttcaaagcttacaaatccaaatcctttggattttccactttcatcagtcattactttcacacttaaggcaggcccaaacttgccaaagagatccttaaggcgctcatcatccatgtcttctccaaaattcttgatgtaaacattggtgaattcttttgccctagctccaagttcagcttctcgttctttacgagacttaaatcgtccaacaaatactttgcgatcatttaggagcattccattcattttttcaatagctctttcagctgcttcctgcgtctcaaagtgtacaaatccatagcccttggaaccattttcatcacaaaccaccttacatgaaaggatgttaccaaaagcagaaaatgtatcatacagtgctttattatcaatggatttgtccagatttttaatgaatatgttgcctactccacttttgcgaagtgatggatcacgctgagaccacatgatgcgtactggcttgccctttataacatcaaaattcatggtgtccaaagcacgctccgcgtccgccggctgctggaagttcacatacgcgtagcccaaggagcggcgggtgatcatgtccctgcagacccggatggagaggatgggcccggccgggctgaacttctcgtagagcat

SEQ ID NO: 375 - DNA, 1705 bp, Homo sapiens
gagtcggagcactatccgcttccatccgtcgcgcagaccctgccggagccgctgccgctatggatgatcgagaggatctggtgtaccaggcgaagttggccgagcaggctgagcgatacgacgaaatggtggagtcaatgaagaaagtagcagggatggatgtggagctgacagttgaagaaagaaacctcctatctgttgcatataagaatgtaattggagctagaagagcctcctggagaataatcagcagcattgaacagaaagaagaaaacaagggaggagaagacaagctaaaaatgattcgggaatatcggcaaatggttgagactgagctaaagttaatctgttgtgacatcctggatgtactggacaaacacctcattccagcagctaacactggcgagtccaaggttttctattataaaatgaaaggggactaccacaggtatctggcagaatttgccacaggaaacgacaggaaggaggctgcggagaacagcctagtggcttataaagctgctagtgatattgcaatgacagaacttccaccaacgcatcctattcgcttaggtcttgctctcaatttttccgtattctactacgaaattcttaattcccctgaccgtgcctgcaggttggcaaaagcagcttttgatgatgcaattgcagaactggatacgctgagtgaagaaagctataaggactctacacttatcatgcagttgttacgtgataatctgacactatggacttcagacatgcagggtgacggtgaagagcagaataaagaagcgctgcaggacgtggaagacgaaaatcagtgagacataagccaacaagagaaaccatctctgaccaccccctcctccccatcccaccctttggaaactccccattgtcactgagaaccaccaaatctgacttttacatttggtctcagaatttaggttcctgccctgttggttttttttttttttttttttaaacagttttcaaaagttcttaaaggcaagagtgaatttctgtggattttactggtcccagcttttaggttctttaagacactaacaggactacatagaggctttttcagcattactgtgtcgtctccgtgccagatgtggcaagatcaccattagcaaatggaaattacatttgaaagccattagacttataggtgatgcaagcatctaagagagaggttaatcacactatagaggcaataagtggtatcagttttcatttttctaattgtttaaactgtgttttataccagtgtttgcaagtaattgggtgttagcttgagatggttaaaggtggtttggggagggacttcgttgtaatggttttgctgttgctgaaaagcatggtgctggtaacagttcaacaatccgtggctgctcattcttgcctactttactctcccactgaagcaggttagctgttgaaggtggtatggaaaagcctgcatgcctgttcaattcttttgtttcttctccttccccctccccctacctccttcccctcactcctcccctccttcgctcgctcaacctcttttgttcagtatgtgtaacttgaagctaatttgtactactggatatctgactggagccacagatacagaatctgtattgttcttactgaaacacagcatggaattaacattaaacttaaataaaacaaacctaaattaaaaaaa

SEQ ID NO: 376 - DNA, 1970 bp, Homo sapiens
ggccttggggctttgtgagatagctagggtcgacttgtgtggattctagtagaacggagctgaccctatccgaacaggcccctgcctgcttggatagaggcctccgaacaggagtaaagaatggctgttgaacatccacaaggcacctgcaagactatgaatcaaagttgagaccaagaaattatttctgaaaaaggatatggaaaaccttacaaaacacagcattgagtgttcaagtttcagaggtgattgggaatgtaaaaaccagtttgagagaaaacagggatctcaggaaggacatttcagtgaaatgatatttactcctgaagacatgcccactttcagtatccagcatcagagaattcatactgatgagaaactccttgaatgtaaggaatgtgggaaggattttagttttgtatcagtccttgttcgacatcagcgaattcatactggtgagaaaccttatgaatgcaaagaatgtggcaaggcctttggtagtggtgcaaaccttgcttaccatcaaagaattcatactggtgagaagccttttgaatgtaaagaatgtgggaaggcctttggtagtggctcaaaccttactcaccatcagagaattcatactggtgagaaaccctatgagtgtaaggaatgtgggaaagcctttagttttggatcaggccttatacgacatcagatcattcacagtggagagaagccttatgagtgtaaggaatgtgggaagtcctttagttttgaatcagcccttattcggcatcacagaattcacacaggtgagaaaccttatgaatgtatagattgtggtaaagcctttggcagtggttcaaaccttactcaacatcggcggattcatactggtgagaaaccttatgaatgcaaagcatgtggaatggcctttagcagtggttcggctcttactcggcatcagagaattcataccggtgagaaaccatatatatgtaatgaatgtggtaaggcctttagttttggatcagcccttactcgacatcaaagaattcatactggtgagaaaccttatgtatgtaaggaatgtgggaaggcttttaatagtggctcagatctcactcagcatcagagaattcacactggtgagaaaccctatgagtgtaaggagtgtgagaaagcctttagaagtggttcaaaacttattcagcatcaaagaatgcatactggagagaaaccttatgaatgtaaggaatgtgggaagacctttagtagtggttcagaccttactcaacatcacagaattcatactggtgagaaaccctatgaatgtaaggaatgtgggaaggcctttggtagtggctcaaaacttatccaacaccagctaatccatactggtgaaagaccctatgaatgtaaagaatgtggaaagtcctttagtagtggttcagctcttaatcggcaccagagaatacacactggtgagaaaccctatgaatgtaaggagtgtgggaaggctttttatagtggctcaagccttactcagcatcagagaattcatacaggtgagaaactttatgaatgtaagaactgtgggaaggcttatgggagggattcagagtttcagcaacataagaaaagtcataatggtaagaaactctgcgaattggaaactataaattgaaattatgtgctgaaggaaggactctaaacatatgacttaagaaaattcatagtggtgaaaatctctacaaatagaactaaggtacaaatgccttacttatgcttcacaggttagtcagtctaagaatatttatacaggaaaaaaatcaccccaaataaaataaatatttgaagatccttatctatattcattccttcattacttttggaaaattcttacttgtgaatgttaaaaatgaaaaaaaaatcatttattatattttgcctcaactttaaacattggaaaactcatttctgggttaatc

SEQ ID NO: 377 - DNA, 6896 bp, Homo sapiens
  misc_feature (15)..(20): n is a, c, g, or t
  misc_feature (42)..(43): n is a, c, g, or t
  misc_feature (773)..(773): n is a, c, g, or t
  misc_feature (1007)..(1007): n is a, c, g, or t
  misc_feature (1009)..(1009): n is a, c, g, or t
  misc_feature (1044)..(1044): n is a, c, g, or t
  misc_feature (1350)..(1350): n is a, c, g, or t
  misc_feature (1490)..(1490): n is a, c, g, or t
  misc_feature (2269)..(2269): n is a, c, g, or t
  misc_feature (2938)..(2938): n is a, c, g, or t
  misc_feature (3115)..(3115): n is a, c, g, or t
  misc_feature (3794)..(3795): n is a, c, g, or t
  misc_feature (3797)..(3802): n is a, c, g, or t
  misc_feature (4535)..(4535): n is a, c, g, or t
  misc_feature (4970)..(4970): n is a, c, g, or t
  misc_feature (5042)..(5043): n is a, c, g, or t
  misc_feature (5045)..(5048): n is a, c, g, or t
  misc_feature (5050)..(5050): n is a, c, g, or t
  misc_feature (5052)..(5055): n is a, c, g, or t
  misc_feature (5057)..(5059): n is a, c, g, or t
  misc_feature (5066)..(5066): n is a, c, g, or t
  misc_feature (5083)..(5083): n is a, c, g, or t
  misc_feature (5089)..(5089): n is a, c, g, or t
  misc_feature (5165)..(5165): n is a, c, g, or t
  misc_feature (5169)..(5169): n is a, c, g, or t
  misc_feature (5183)..(5183): n is a, c, g, or t
  misc_feature (5195)..(5195): n is a, c, g, or t
  misc_feature (5197)..(5197): n is a, c, g, or t
  misc_feature (5199)..(5202): n is a, c, g, or t
  misc_feature (5204)..(5204): n is a, c, g, or t
  misc_feature (5206)..(5206): n is a, c, g, or t
  misc_feature (5209)..(5209): n is a, c, g, or t
  misc_feature (5216)..(5216): n is a, c, g, or t
  misc_feature (6146)..(6146): n is a, c, g, or t
  misc_feature (6226)..(6226): n is a, c, g, or t
  misc_feature (6270)..(6270): n is a, c, g, or t
  misc_feature (6286)..(6286): n is a, c, g, or t
  misc_feature (6639)..(6639): n is a, c, g, or t
  misc_feature (6703)..(6703): n is a, c, g, or t
  misc_feature (6706)..(6712): n is a, c, g, or t
  misc_feature (6715)..(6717): n is a, c, g, or t
  misc_feature (6720)..(6723): n is a, c, g, or t
  misc_feature (6725)..(6728): n is a, c, g, or t
  misc_feature (6731)..(6732): n is a, c, g, or t
  misc_feature (6734)..(6735): n is a, c, g, or t
ttttattttttttannnnnntatttttttttttttttttttnnttaagaaaagctaaatttatattaaattatcataaagtcctaaaatactgaacatagtggttaaataactccagaaagtccaatctctccagtgagtaacgttaaaaccattacacatgagcatgggagaatcgcttccattagtttaggacagagagattttgctttttacagagtaaatcagtgctcaaatagatacttcctcaaatatgtcctttctacattctgaacagcccaagtgcaataagatccttccccctttccaatcaagaaaatgccacttttctacttgctcttcctccccagacatgagtctaaggacccaaagtgctcactcctttactgcttgttaagtgtaatgtggggaggctcagaactggggctgacgctactgagagcaaggctaagggcctggtatctctctctagcagtcttagaactgactagaaaagaattgatcttgtcctttttcactttggtagctgatttctcaataccagtaaccacaggagaagtttcaactcaggaaacttcccctagaaattctcccctccattcccagcccctgttgttctctcctgccacttctaattcctgggggagaagaggtctgggtctgccatgggctaggagggcctcatcagtggtgctctctaccttcctactccttacccacctctttgtatttttatttattcagccctcccaccacaggactttggagattgcnggtgccacaaggcttggtcagaaaaagcaaattaggcaaaaaaacaaacaaaaaaaccccacgaagaacagctagggagacgttttagggcaaaaataagtctcaatttccctgataccaggctgagacacgtgccctttgtgtgaatgagcatgaaccaagtgatggcatcccacatggaaactaagccccttagctgaggggacagctggaagaggaacatcaccaccccgnanccacaggcttgctgtccactaacttagatccctgngcacttgagaaagaacataggaagttcaacaggaagtttgaccctcatggatacttctctttaggccctgggtttcccaagtctccaacctgatcgttctttctgaccatttatgacaacttctggtttttctttgaaagcttgtttctaggtctcttccccagaatcccaggacatgagggagagaggggtcaggaggtataccatatttggtctaggcagagcttcttagacttttcagagactcagcccccaaggcctaacattcactcaagccactggctcacaacctggttaatttgagcnaagacttaggaaaggtactggccagtggtggcaccaggagggaattcctattagccagtagccttgtgataggggacccagttatctgaatgtagaaacagctccagacattctaggaggaggaagaacagcctgagccncccccatctcaccagtatctgctgctgaaaaggcagtgtctcttagggcaagaataatgtccactgccagcaatggaccagacacccagatccaactaccccccagagctttttcatgttaccaacacacttgaggctggaggtttcccagatgcccatacctgctgggctgattcttccttcttctctcagcctctatccttcatccctgtctttacccacacccccatgtcccagcccctgatgggcaagttctctcagagaagcagtcatgctggctgtgatggggcagagcgcagtcctgggtcatcagctgcatcagcactgagaagcaggcactgagggtactggggaaaggggaggtggagctctacgctggtgaggaatcacgaataagcagtttcagggggcccaggatggagtacaagatgtgaggttcatggtaaaatccaggtctaaattctcgtgatgtgccatcatttcttgtgcacaggtagttatggactcacgtggtaaacagctccggtgaaggcttaggaacagttatggggtgggaggaggaggaggacaagcacacagaagcggggcctgcggtgtaagcgagcacaaggactagacgtccataaaggagaaggaacaggcaggcagggaagagaatgtgggcatttagacctggctctctgaggagagcttgcgttcatgtttccagcccgtgtctggcagagagcctcgtctttctggagtggctgcagtatggacgctgctacactcagactgcncttcctgtaacagctgctccgtctctgtgtcatccagggagccagagctggcctggatggacaccgtgtctgtcttcatgcatacatgatcccggaggaggcccccccgtgagcttcgcagttgcttgaggtcatcccactcagcatcatccccagacaggaggcagattccctctacgatcttgatcttctccttggtgtagttatggtcaggccctccctctttcttatagcacagctggttgtacatggctggtttggggattgcttcaatcttcacttcctgtgtggatgttcggtaggaggggttgctgtaggtgaggttccccattccaggatcagtgaacttggattttttgtgtctgtacagcatcaaagctgcaatcaccaccaaaatcagcagaatactgaggagtccaccaatggcgtagctgatatgaagtccttcccctggagcagcaggaacagcgtcattggaacgtgcacagaggcccagcctggcatccctttcagagcatcttccttccacctcctccagagacgtgcgggtccgggtggttgaagaatacaaggtggtaggtggtgtgttgggtagcactgggctcttttcactcatgccagtagccctaggagctggtggtaccaggccaggcacaagggagcagggcnggctatcaggttcgtcaggacaggcacatacgaagtccgaggctctggcaaagcagaggtgggtgcagccaccattgttcacaccacaggcattggtccctgtctgccgctgaggggaaaccacgatgatatccatgagtccttccacatttgccagcactgtctccttgttccggncctgagtatttgtcaacacgctggattgacttggtctgccagtctgtccagtagatccacctgtcttgctgtgtgagggcaaaggggtgggacacatggccgaccaagacctgccgcagtttcccattgaggtcagcactctcgatccggtccagatgcgcatccacccagtagatcctgcgggtatcatagtccagggtaaggccattgggccaacccaggtctgtgttgatgaggaccttccgctcagaaccatccaagtttgcccgttcgatcttggcaatgtggccccagtctgtccagaagaggtaccccttcctggggaaaacagcaatggcccggggctcatccaggctattgttgatcagtactttgcggcaggaaccatccagcctggacgcctcaatggtatttcgacctgtgtctgtccagtacaggttcctggccacccagtccactgccagcccgtcagtggtcttcagccctcgcccgatcactgtctccatgttgctgccgttcaggtctgctcgcctgataacatccaggaacacatctgtgtaatagacctttccatccacgctgtcatagtccagggagatgacattgttgagctcaggaacagggacatgcacatcggtgtggtcactggtgtccagtgagatacgccggatggagccanngnnnnnnaagagcaggtaggtctcaggagagggatcacaggtcttcccatctcccttcagctggatgccagtggggcaggcacaggagaagccagaaggccgaggcaagcagaggtgggagcagccgccatttctcgagccgcacttgttaaaacctagtggctgtgcccggtccacagcctgcatgtccatgaggcctggcaggttggacctcacgaggatgacattgctgccagtacccttgtcagcacggtggatgctccgagtctgccagtcagtccagtagatataggagtcgagcagggtgaggccatatgggtgctgcaccggtgacaccaatgtatgccgattggcaccattcaggtcagcagcctcaattcgctcggtgtgggcatcggcccatagcagttgggagctggccttgtccacagtcagtccattgggccatcctaggttgttgttgatgagcaccgcgcggtctgagccatccattccggaccgctctaacttggcattctccccccagtctgtccagtacataaaccccatctcatggtacagtacgatggcccggggactgtcaaggttctgccacaccaacactttccgcatggacccgtccaggttgcccacttcaatccggtttgttcccgtgtctgtccagtatactttccggccaatggcatcaaccgcgagcccatctgtggtctgtagccctgtggtgatgatgtcctcatgcngtgagccatccagattggcacgactgatcctgtgcagtgtgctgtcagaccagtacacctttccttcctgggggtctactccaacggcaatggtgttcttcatggtaatgttgattggtaccaccacatcagcaaaataagggatgtccagggagaccatgcgaatgtctatcctcctggcgaagatgaggaaactgttcatgcctggtgagcaggtcttgccatcagacagcaggttgatgcctgtggggcaggtacagctgaatccgcttggatttggggacctaagacacaggtggctacagccgccattctccatagcacatggtgtagacactgggggccggcggcggtggaagacatggatgtccattaggttttccaggttctcctgcagagtctcccggtccagccctgtcagccggtcagcgctcngtatgctcttggtctgccagtcagtccaatagatgcgctctccatagagggtcagcccaaatgggtgggggnncnnnntncnnnncnnnaccttcntcttactgccatccagntccagncaaattcaattgtcttcatgccggcgtcagcccagtatagacgctgggacccataatcaatagctaacccattagngccnggtcagattagaangagataatgacntngnnnncntnagngcatccnatgccagctcgttcaatcttggggctcgcaccccagtcagtccaatacatgtacccgcccatgggttccaccacgatgtcccgaggacgatcaaggttctcccagatgagtactgttctcatgctgccatctgtgttggctacttcaatccggtctgtacctgcatctgtccagtacagtttgttggtgacccaatcaatggccaggccagctgggctctccaaactggtatccactaccacctcctgtcctgttccatcccacttggccctgctgatggtatcagtgctgacatctgtccagtacacgtggtcatcccgggagtcccagtcaagggccacagcactgcgcacgtcagccagtgggatgacatcatcagacaggtcctctgtgtcaaagctgattcgacggatgtccatccttcgggcaaaaagcaggaacttgtcaagactctgggcacaggcgtggctgctgatcttgcggaagccagtggggcaggcacaggtgtagttctggccactgggcagacacaggtgcgtgcagcctccgttgttgtccccacagcggtttttccctgcaggttggcgctgggggtgcaaggtgtggatgtccatagggaagtggagtttgttgcgaatgatttcctggttcttccccgtaaatttgttagcgctattgatgctcttggtgtgccagtctgtccagtacaggctgtcttcaaacactgtgatggcgaagggatgcgggaggccctggctaatgacagccttacggtgactcccatccagattggccctctcgatgacatggtgcttagcatccacccagtacatacggcgcccggcatagtcgatggtgaggccattgggccagaagagatgggtatcggcaatgatgcggcgtccagagccatccatgctggaggcctcnatacggggggtgttgccccagtctgtccagtaaatggtaccctccatgggatgcaaggcaatggcccggggcttctccanggttctgccacagcaacaccttccggtgggccccgtccagattngccacctcaatcctcnaggtgcctgagtcggtccagtagagtttgtcatggacccaatccacagccaggccccctgggctctccagcccagtagacacaacctcctccacgttgctgccgttgaggttggcacggaggatccggtccagggtgacatctgaccagaagacaagctcgcggcggtggtggaaatcaagggcaatggcattctccaggttgttaagcagcagtgtgtactcagagcggtgtggcagcacctgccggatgtcgatgcgattggcgaacagcagcacaggctctggccccagagccttgcagctgcgccggtcgggccgtagttcatagcctgtttcacaccagcattggaangccccttcgctgttggtgcagccctggctgcaatacccctcctcggcacattcattcacatctnggnnnnnnngcnnntcnnnngnnnnccnntnncctgtgtggcaggtacactgcactgccccccgcaccatctggcacttctgggcacagccaccgttgttaacattgcagttctcctcacccgtccggggccggcaattctgctgtgggctttcgtcgctgttgtcaccacagtcgttgaccccgttgcacag

SEQ ID NO: 378 - DNA, 1004 bp, Homo sapiens
ggcacgaggcttcctggaagggtgcgataaggccgggcgaggtgcctgggatgcttctccccttccgcgaggaagagatctaattgggtagggcgggtgtagactagcctgccgagccgcccgctggcacctgcagcctcctgggcgcccgccgggccccggcgagaaagttgttaaagggagcgaggtggttgttcctggggtccgaggcgcgcctctcacgccctgcccaacagaagccgcagtcccgtggggtctggagacgcagtttcctgttaatgacaataaatccctgctccccctgcctcagacatctacgcagcgaaatcgagcctggccttgagggtccacaccgcgagggaagatgcgtgcgcccattccagagcctaagcctggagacctgattgagatttttcgccctttctacagacactgggccatctatgttggcgatggatatgtggttcatctggcccctccaagtgaggtcgcaggagctggtgcagccagtgtcatgtccgccctgactgacaaggccatcgtgaagaaggaattgctgtatgatgtggccgggagtgacaagtaccaggtcaacaacaaacatgatgacaagtactcgccgctgccctgcagcaaaatcatccagcgggcggaggagctggtggggcaggaggtgctctacaagctgaccagtgagaactgcgagcactttgtgaatgagctgcgctatggagtcgcccgcagtgaccaggtcagagatgtcatcatcgctgcaagcgttgcaggaatgggcttggcagccatgagccttattggagtcatgttctcaagaaacaagcgacaaaagcaataactgaaaaagactgtcctgtcagcgatgactttatacatcaagggggtcttgttttgctagagagtttggggtttggtttgtggatttcattgtgatttataataaggcttattttcacagaataaaataaagcaaaaaaaaaaaaaaaaaa

SEQ ID NO: 379 - DNA, 4712 bp, Homo sapiens
cccggcggtggcggcgtctctggccggccttggtgcggcgagccgagcgaggcagctctgagccgcgcggaaatctggcattttttaaagtttgcgccccacaaagaggaaatattccaaaggtactcaggatgtaaaaggggagatcttcacagatgcctccgtggatggcatggcaatccatccatcaatgagaagaccatgatttcttttaattttctgtgtgtttccacattccccagtgagaattcttccacctttttttgtgccatgggaaaaacctgaagggcaggcagagctgctcccgaacttgtgaccttctctgaggttgcagcggctcttgtagaacatgactctgggacatcacttccttttgttttctttcggagctgaaccaaagaatgtgcaccctctttctctagtgctgtggtgtctgcttatttttgtatttgtgctttccatccatcttctgtgatcacaaggcattcttaaggttttctagcacgacttgcggacatccagactcgtggggggcccacccatggctcggtaagccagcagcccagggcactggcactaccatgaggcactgcattaattgctgcatacagctgttacccgacggcgcacacaagcagcaggtcaactgccaagggggcccccatcacggtcaccaggcgtgccccacgtgcaaaggagaaaacaaaattctgtttcgtgtggacagtaagcagatgaacttgcttgctgttctcgaagtgaggactgaagggaacgaaaactggggtgggtttttgcgcttcaaaaaggggaagcgatgtagcctcgtttttggactgataataatgaccttggtaatggcttcttacatcctttctggggcccaccaagagcttctgatctcatcacctttccattacggaggcttccccagcaaccccagcttgatggacagcgaaaacccaagtgacacaaaggagcatcaccaccaatcctctgtaaataatatttcatacatgaaggactatccaagcattaaattaattatcaacagcatcacaactaggattgagttcacgaccagacagctcccagacttagaagaccttaagaagcaggagttgcatatgttttcagtcatccccaacaaattccttccaaacagtaagagcccctgttggtacgaggagttctcggggcagaacaccaccgacccctacctcaccaactcctacgtgctctactccaagcgcttccgctccaccttcgacgccctgcgcaaggccttctggggccacctggcgcacgcgcacgggaagcacttccgcctgcgctgcctgccgcacttctacatcatagggcagcccaagtgcgggaccacagacctctatgaccgcctgcggctgcaccctgaggtcaagttctccgccatcaaggagccacactggtggacccggaagcgctttggaatcgtccgcctaagagatgggctgcgagaccgctatcccgtggaagattatctggacctctttgacctggccgcacaccagatccatcaaggactgcaggccagctctgcaaaggagcagagcaagatgaatacaatcattatcggggaggccagtgcctccacgatgtgggataataatgcctggacgttcttctacgacaacagcacggatggcgagccaccgtttctgacgcaggacttcatccacgcctttcagccaaatgccagactgattgtcatgctcagggaccctgtggagaggttgtactcagactatctctactttgcaagttcgaataaatccgcggacgacttccatgagaaagtgacagaagcactgcagctgtttgaaaattgcatgcttgattattcactgcgcgcctgcgtctacaacaacaccctcaacaacgccatgcctgtgaggctccaggttgggctctatgctgtgtaccttctggactggctcagcgtttttgacaagcaacagtttctcattcttcgcctggaagatcatgcatccaacgtcaagtacaccatgcacaaggtcttccagtttctgaacctagggcccttaagtgagaagcaggaggctttgatgaccaagagccccgcatccaatgcacggcgtcccgaggaccggaacctggggcccatgtggcccatcacacagaagattctgcgggatttctacaggcccttcaacgctaggctggcgcaggtcctcgcggatgaggcgtttgcgtggaagacgacgtgagagctgaattgttgctgcacgtgctgggcccgccaatgccgtcatcatcaggattttacaaatctctttgcggggaactgtttcactcatggtatggaaaaccccaggactctgccactctaggcacacatgaattataaccattttggaatttccttcgtgatgttcgagagctcagcaatggacccctcacagagctcctctatccgaggccattggagaccccagtttctcaagaattcagctctgctctgagcgtcctggagcttggggatgcagccagctggcctgcactgggtgtggagagaacacctagggaaggcagcctggccctgcccgcctccgccttctggagagcctctgggttctgagtcagcaagccagaggtcatgccacaggcctggctggaacttacacttcacgttccctttttttccccctagagatggggtctcgccgtgttgcacagactgtctgtattcaatggctatcttcacaggtgtgatcataccacattcacttctgaaacactcttgttgcgatcgctaacctcactgggacagagaaccgcagtctttcgagaatggaggctcttcattttttttttctcctttactccaaactcagccctccagtttcttcagatgtaaaccctgttaacgtcactgtttccaaaaggaaaaaaataagtcagtttttggcagcaccttcatctttctgacctcctcctattctgtccttgtggacttatgtttaacatagaaaatgaatgcgtttaaaacaaaaccactttctgcatttaaccagtcctggctctctctctgctgcctcttcatacgttttctcaagaacttcagtttataattggaagagaaatttttgctgttaatgccagaatgagcaacctcaaggaattgaacacttcttggaaaatctaggtaattcaagccctcatcaggtttacaagatcatcagagaaacagaggattttaatttttagttctggccggctacaggctccatttctctgccttcccattggaaatagtttatttccacattctccactgcgtgtggtcaaagttcctcacccagcaagggactatagatactcgtgtcccaattccaaaacacaatgcacaagctgaacttgggctgaacgtggcgtgttgagatttggaatgaggtttctaagagccgtgttcttcatggaattttccaggccacttggcagcttggtttaccgatggatgggctagagatcttgtcgtttcttggaagtcacagggaagattgaagagaacgcttgagcatccttggcaacagcccaggtgggacctggatgaagctttgcactcaagtattgtcaagggaagcttcctgtgaaccaaagttctcaggccaaggtctcgcccaccaaagccagaaagtgcaagcacccgtctacccagctctaacttgtatgtgtgagacagaccaggcttcgggggtaggaggatctgcagttgttcagccgtctttctgctggtgttgtctttctgccatcagagaagggacacacagcccgttcgaaggtgtgcagagggctctgagcgccaggatggccagggctgtttttgctactgaaggagcgtgtgtcctgaactcccacttgcagggacagtccccaccttctctatagccggcactgggagcagccgccagcagggaaatctggcctgagcacaaggatgctttagggagagatcacttcagtgtgtgtgtatatttatttgcagtacagtgcgcgcgtgtgtgtgtgtgtacgcgcacgtgtgggtgagtgcgtcttctgagtgggttctgttcagttgctaatgaggctcctccgctctggacacaacccttttatagattaatttctctgccaattaacttgtcattttcagtacatattttactattccacaccaaccataattacaacaagggatttttcttatgcactcctatgcatgtgaataacatgtggtgtaattctgcttcttacagaagtattactgaaggtattatttccaatattatttggtttattatgcggatcttttttatatatgcagtcccatcccttctgtgccactcaatgccatccagacatggtttttccctccaggggcctttctctccagagggcacttcggctgcctctgcttcctctcattcgaggcccggctcttgctgacagaataggttccgttctgggcggtggttctcgagcctgccattcaaaaccaaagcaaattggagcatttctcacaacatggtattgaagttcctttttgttctcaaaagttgtgaccgtgttaaattgtactcccttagtcctgtaaggtatgttaagtgaatcgcagttacgctgtacttttattaatatttaacataattaaagatggacccataagagtg

SEQ ID NO: 380 - DNA, 1030 bp, Homo sapiens
gcctgtgagcagcgagatccagggacagagtctcagcctcgccgctgctgccgccgccgccgcccagagactgctgagcccgtccgtccgccgccaccacccactccggacacagaacatccagtcatggataaaaatgagctggttcagaaggccaaactggccgagcaggctgagcgatatgatgacatggcagcctgcatgaagtctgtaactgagcaaggagctgaattatccaatgaggagaggaatcttctctcagttgcttataaaaatgttgtaggagcccgtaggtcatcttggagggtcgtctcaagtattgaacaaaagacggaaggtgctgagaaaaaacagcagatggctcgagaatacagagagaaaattgagacggagctaagagatatctgcaatgatgtactgtctcttttggaaaagttcttgatccccaatgcttcacaagcagagagcaaagtcttctatttgaaaatgaaaggagattactaccgttacttggctgaggttgccgctggtgatgacaagaaagggattgtcgatcagtcacaacaagcataccaagaagcttttgaaatcagcaaaaaggaaatgcaaccaacacatcctatcagactgggtctggcccttaacttctctgtgttctattatgagattctgaactccccagagaaagcctgctctcttgcaaagacagcttttgatgaagccattgctgaacttgatacattaagtgaagagtcatacaaagacagcacgctaataatgcaattactgagagacaacttgacattgtggacatcggatacccaaggagacgaagctgaagcaggagaaggaggggaaaattaaccggccttccaacttttgtctgcctcattctaaaatttacacagtagaccatttgtcatccatgctgtcccacaaatagttttttgtttacgatttatgacaggtttatgttacttctatttgaatttctatatttcccatgtggtttttatgtttaatattaggg

SEQ ID NO: 381 - DNA, 2430 bp, Homo sapiens
cacaggggcactgacatctttgctggactcttttaatcctcataaacccaggctgctggcactcgaaatttgagaagggcaatcagtctggcctcttgcctttctggcctgcaggcccagcctgaacaaacaatttaggtggagctcctggaggctggaagcagagaggaggtacctcaccatcctctcctgccagctgttgcagactctgcctggggaactgtttaagggtgagcagaggcatttatctccatgttaacaagcagatgtcatggcacccccagtaccggagctccaagttccgtcatgtctttggcaaaccagccagcaaggagaactgctacgactccgtgcctatcacccgcagcgttcacgacaaccacttctgtgccgtgaacccccacttcattgcagttgtgactgagtgtgctggtggagggggcttcctcgtcatccccctgcaccagacagggaagttggacccccactacccaaaagtctgcgggcacagaggcaacgttttggatgtcaagtggaacccttttgatgattttgagatcgcctcctgttctgaagatgccacaattaagatctggagcatccccaagcagctgctgaccaggaacctcacggcctacaggaaggaactcgtgggccacgcgcgcagagtaggcctggtggagtggcaccccacggccgccaacatcctcttcagtgctggctatgactacaaggtgatgatctggaacctggatacaaaggagtctgtcatcacaagccccatgagtacgattagctgtcaccaagatgtgatcctctccatgtccttcaacaccaacgggagcctgttggccaccacctgcaaagaccgcaagattcgggttattgacccccgagcagggaccgtcctccaggaggccagctacaaagggcaccgggccagcaaagtgctgtttctggggaacctgaagaagctgatgtccacaggcacatcccgatggaacaaccggcaggtggccttgtgggaccaggataacctctctgtgcctctgatggaggaggacctggacggctcctcgggcgtgctgtttcccttctatgacgcggacaccagcatgctctacgtggtggggaagggagatggcaacatccgctactacgaggtgagcgccgacaagcctcacctgagctacctgactgagtaccgctcctataacccacagaaggggatcggtgtcatgccaaagagaggactcgacgtgtcctcctgcgagatcttccgcttctacaagctgatcacaaccaaaagcctcatcgagcccatctccatgattgtgccccgggggtcagaatcctaccaagaggacatataccctccaacaggaggggcccagccctccctgacggcccaggagtggctcagcgggatgaatcgagacccaatcctggtgtcccttaggcctggctctgagctgctgagaccccacccactgcctgcagagagacctatcttcaattccatggccccagcctcaccccggctcttgaatcagacagaaaagctggctgcagaagatggctggaggtcttcctccctgttggaggagaagatgccaaggtgggcagcagaacacaggctggaggagaagaaaacctggctgacaaatggctttgacgttttcgaatgccccccaccaaagacagagaatgagttgctgcagatgttctaccggcaacaggaggagatccgaaggctccgggagctgttgacccagcgagaggtccaggccaaacagttggaactggagatcaaaaacttgcggatgggctcagagcagctctgagcagagacctctgccctcctcaccctcagggacaccactcggctccatggggaggtttagaaccaaaccacaagtcccctcaaggacaaccactatttctatattttttaccagaaaaccaaactctccatcgctgaaagagattccagtgggacatggtgccgtttttctgtttgccttcttgcaacaacagtttctgaattgactttgttttcagatgatgccttctgatgaattctgttattaagggcccatgatgagctgtaacttctcaagaggaaagaacacagtagaaaactagagctggaaggatctaggttgacctgtctgtgattttcaaccctgtggtccagagaatagggaagactggccagacgcactggctcatgcctgtaatcccagcactctgggaggctgaggtgggcggatttcttgaggtcgggagtttgaaaccagtctcaccaggcgcagtggctcacgcctgtaattccagcatgttgggaggccgaggctggtggatcacgaggtcagcagttcgagaccagcctgaccaacatggtgaaaccccatctctactaaaaatccc

SEQ ID NO: 382 - DNA, 3736 bp, Homo sapiens
  misc_feature (883)..(883): n is a, c, g, or t
  misc_feature (1748)..(1748): n is a, c, g, or t
  misc_feature (3110)..(3111): n is a, c, g, or t
  misc_feature (3584)..(3584): n is a, c, g, or t
  misc_feature (3586)..(3587): n is a, c, g, or t
  misc_feature (3589)..(3595): n is a, c, g, or t
  misc_feature (3597)..(3599): n is a, c, g, or t
  misc_feature (3723)..(3723): n is a, c, g, or t
tttcagcgtcgtcgcctggagcggcggtttagagaaccgagcctgatgggcgccaaggccggctggctgcttggagcgctgcctcgaagggcctgcgtgaaggaagctaatccggagaacccaggccagagcctggaaatatggcgacctgcatcggggagaagatcgaggattttaaagttggaaatctgcttggtaaaggatcatttgctggtgtctacagagctgagtccattcacactggtttggaagttgcaatcaaaatgatagataagaaagccatgtacaaagcaggaatggtacagagagtcaaaaatgaggtgaaaatacattgccaattgaaacatccttctatcttggagctttataactattttgaagatagcaattatgtgtatctggtattagaaatgtgccataatggagaaatgaacaggtatctaaagaatagagtgaaacccttctcagaaaatgaagctcgacacttcatgcaccagatcatcacagggatgttgtatcttcattctcatggtatactacaccgggacctcacactttctaacctcctactgactcgtaatatgaacatcaagattgctgattttgggctggcaactcaactgaaaatgccacatgaaaagcactatacattatgtggaactcctaactacatttcaccagaaattgccactcgaagtgcacatggccttgaatctgatgtttggtccctgggctgtatgttttatacattacttatcgggagaccacccttcgacactgacacagtcaagaacacattaaataaagtagtattggcagattatgaaatgccaacttttttgtcaatagaggccaaggaccttattcaccagttacttcgtanaaatccagcagatcgtttaagtctgtcttcagtattggaccatccttttatgtcccgaaattcttcaacaaaaagtaaagatttaggaactgtggaagactcaattgatagtgggcatgccacaatttctactgcaattacagcttcttccagtaccagtataagtggtagtttatttgacaaaagaagacttttgattggtcagccactcccaaataaaatgactgtatttccaaagaataaaagttcaactgatttttcttcttcaggagatggaaacagtttttatactcagtggggaaatcaagaaaccagtaatagtggaaggggaagagtaattcaagatgcagaagaaaggccacattctcgataccttcgtagagcttattcctctgatagatctggcacttctaatagtcagtctcaagcaaaaacatatacaatggaacgatgtcactcagcagaaatgctttcagtgtccaaaagatcaggaggaggtgaaaatgaagagaggtactcacccacagacaacaatgccaacatttttaacttctttaaagaaaagacatccagtagttctggatcttttgaaagacctgataacaatcaagcactctccaatcatctttgtccaggaaaaactccttttccatttgcagacccgacacctcagactgaaaccgtacaacagtggtttgggaatctgcaaataaatgctcatttaagaaaaactactgaatatgacagcatcagcccaaaccgggacttccagggccatccagatttgcagaaggacacatcaaaaaatgcctggactgatacaaaagtcaaaaagaactctgatgcttctgataatgcacattcngtaaaacagcaaaataccatgaaatatatgactgcacttcacagtaaacctgagataatccaacaagaatgtgtttttggctcagatcctctttctgaacagagcaagactaggggtatggagccaccatggggttatcagaatcgtacattaagaagcattacatctccgttggttgctcacaggttaaaaccaatcagacagaaaaccaaaaaggctgtggtgagcatacttgattcagaggaggtgtgtgtggagcttgtaaaggagtatgcatctcaagaatatgtgaaagaagttcttcagatatctagtgatggaaatacgatcactatttattatccaaatggtggtagaggttttcctcttgctgatagaccaccctcacctactgacaacatcagtaggtacagctttgacaatttaccagaaaaatactggcgaaaatatcaatatgcttccaggtttgtacagcttgtaagatctaaatctcccaaaatcacttattttacaagatatgctaaatgcattttgatggagaattctcctggtgctgattttgaggtttggttttatgatggggtaaaaatacacaaaacagaagatttcattcaggtgattgaaaagacagggaagtcttacactttaaaaagtgaaagtgaagttaatagcttgaaagaggagataaaaatgtatatggaccatgctaatgagggtcatcgtatttgtttagcactggaatccataatttcagaagaggaaaggaaaactaggagtgctccctttttcccaataatcataggaagaaaacctggtagtactagttcacctaaggccttatcacctcctccttctgtggattcaaattacccaacgagagatagagcatctttcaacagaatggtcatgcatagtgctgcttctccaacacaggcaccaatccttaatccctctatggttacaaatgaaggacttggtcttacaactacagcttctggaacagacatctcttctaatagtctaaaagattgtcttcctaaatcagcacaacttttgaaatctgtttttgtgaaaaatgttggttgggctacacagttaactagtggagctgtgtgggttcagtttaatgatgggtcccagttggttgtgcaggcaggagtgtcttctatcagttatacctcaccaaatggtcaaacaactaggtatggagaaaatgaaaaattaccagactacatcaaacagaaattacagtgtctgtcttccatccttttgatgttttctaatccgactcctaattttcattgattaaaactcctttcagacatataagtttaataaataacttttttgttgactttcaannaaagtgattttttttaatttaacataaagtcttcagaaagcctttctatgaaagaattttaacctataatgtaaaggatgtattctgagagaacaaagcagaatgaaacttgagtcacttactaaatatagtggatataaaatagaacacctgactttgctcttagaccataacccccgaacttactatgttcatatatttgtattgaacaatcttttaaaagcaaaaatgtaaatgatgtgtagtttatttgtgcttttattgttttccctgcgtctcagacatgttgagaatcatggacaaaacctgctggaattttggaatttttgaagatgtaaataatgtgtatttatgttataagtaacatatgtaaacatgtatatttgttttatatttatttttgtaacaccagtgtctgatgaaacatttttgcaaatgcattttataaaaaaataaatatagtgataagttanannannnnnnnannnatttaattaaatacttatttttaaataacttaccagtaaactcactttttaaattttgttgcctgttgaggagccaattaaattttaaatattaattttgcaaatgttaaatacattgtttctntattatctgaaaa

SEQ ID NO: 383 - DNA, 1567 bp, Homo sapiens
gattcacatccattggtcaggggcaaataccactagctctgcatcctcagtcactttgtgccatttcatcaggtcagagccaaaggaaagcttgaaaaatgaagacattagcaggacttgttctgggacttgtcatcttggatgctgctgtgactgccccaactctagagtccatcaactatgactcagaaacctatgatgccaccttagaagacctggataatttgtacaactatgaaaacatacctgttgataaagttgagattgaaatagccacagtaatgccttcagggaacagagagctcctcactccacccccacagcctgagaaggcccaggaagaggaagaggaggaggaatctactcccaggctgattgatggctcttctccccaggagcctgaattcacaggggttctggggccacacacaaatgaagactttccaacctgtctttggtgtacttgtataagtaccaccgtgtactgtgatgaccatgaacttgatgctattcctccgctgccaaagaacaccgcttatttctattcccgctttaacagaattaaaaagatcaacaaaaatgactttgcaagcctaagtgatttaaaaaggattgatctgacatcaaatttaatatctgagattgatgaagatgcattccgaaaactgcctcaacttcgagagcttgtcctgcgtgacaacaaaataaggcagctcccagaattgccaaccacttcgacatttattgatattagcaacaatagacttggaaggaaagggataaagcaagaagcatttaaagacatgtatgatctccatcatctgtacctcactgataacaacttggaccacatccctctgccactcccagaaaatctacgagcccttcacctccagaataacaacattctggaaatgcacgaagatacgttctgcaatggtaaaaatttgacttatattcgtaaggcactagaggacattcgattggatggaaaccctattaatctcagcaaaactccacaagcatacatgtgtctacctcgtctgcctgttgggagccttgtctaatttcagataatggttagcattacgatggctactataaataaaccattcttactgctctcttccaaaacaaaactcagcatgatactttgagattgtgttctgagagatgatatgactacataaaatacaattaaaaatgttataatataatgaaaatgtagtaatttaagaaaacaccagatgagttaggaataaacctataacatttacaaaaagagcaaaactaagtgatagaaaatatttcacacatgttcttatagatcatgtatcacttgcaagttttaggagttcatatcctatatcatttcaaattaagtacataataaagtaaaattttgaaatgaacactttaggtatttttgccaagatttagatgtttttaattaaacttttctcttcctttttttttcactaaggcatgtttattcccctaatccattaaagagcatgaaaaaaagaataaatgtatttgaaaaaaaaaaaaaaaaaaaaaaaaaaaa

SEQ ID NO: 384 - DNA, 7725 bp, Homo sapiens
  misc_feature (52)..(52): n is a, c, g, or t
  misc_feature (65)..(65): n is a, c, g, or t
  misc_feature (105)..(105): n is a, c, g, or t
  misc_feature (300)..(300): n is a, c, g, or t
  misc_feature (310)..(310): n is a, c, g, or t
  misc_feature (316)..(316): n is a, c, g, or t
  misc_feature (324)..(324): n is a, c, g, or t
  misc_feature (358)..(358): n is a, c, g, or t
  misc_feature (364)..(364): n is a, c, g, or t
  misc_feature (375)..(375): n is a, c, g, or t
  misc_feature (392)..(393): n is a, c, g, or t
  misc_feature (872)..(873): n is a, c, g, or t
  misc_feature (880)..(880): n is a, c, g, or t
  misc_feature (897)..(897): n is a, c, g, or t
  misc_feature (903)..(903): n is a, c, g, or t
  misc_feature (908)..(909): n is a, c, g, or t
  misc_feature (967)..(967): n is a, c, g, or t
  misc_feature (974)..(974): n is a, c, g, or t
  misc_feature (987)..(987): n is a, c, g, or t
  misc_feature (994)..(994): n is a, c, g, or t
  misc_feature (1003)..(1003): n is a, c, g, or t
  misc_feature (1169)..(1169): n is a, c, g, or t
  misc_feature (1177)..(1177): n is a, c, g, or t
  misc_feature (1183)..(1187): n is a, c, g, or t
  misc_feature (1189)..(1194): n is a, c, g, or t
  misc_feature (1494)..(1494): n is a, c, g, or t
  misc_feature (1764)..(1764): n is a, c, g, or t
  misc_feature (2438)..(2438): n is a, c, g, or t
  misc_feature (2441)..(2443): n is a, c, g, or t
  misc_feature (2951)..(2951): n is a, c, g, or t
  misc_feature (3792)..(3792): n is a, c, g, or t
  misc_feature (3847)..(3847): n is a, c, g, or t
  misc_feature (3868)..(3868): n is a, c, g, or t
  misc_feature (3953)..(3953): n is a, c, g, or t
  misc_feature (4022)..(4022): n is a, c, g, or t
  misc_feature (4107)..(4107): n is a, c, g, or t
  misc_feature (4604)..(4604): n is a, c, g, or t
  misc_feature (4613)..(4613): n is a, c, g, or t
  misc_feature (5360)..(5360): n is a, c, g, or t
  misc_feature (5539)..(5539): n is a, c, g, or t
  misc_feature (6248)..(6248): n is a, c, g, or t
  misc_feature (6378)..(6378): n is a, c, g, or t
  misc_feature (6423)..(6423): n is a, c, g, or t
  misc_feature (6425)..(6425): n is a, c, g, or t
caggtaattcctagagccagttgccagtttaggatcccagatattaaccaancccaaggaatcgnccaagccagatgaaaaagacccaagccaaaactcagtccntttttcccaagaaacatgcttgagattctgctgccacctattggtgattcctcttcaatacggctagagtcacaaaggctaaattggaaacccagtcaagatttccctcttcaaaaaaaaatcacccagtcaagatttcccttttcaaaaaaaaacttttgctattgaagaccactgacaggaaagaaatatggnacccaaaagnctgcantacagttnaaaaagcaacttagaaggtagaatattttggggntggggntggtgtgtganaggcaaactaagtctanntttaagaacagggacattaaaaactttattcaataaatacaacaaataatttaaaaatatatttcaattccaaagccaattaagaagaggaagtagagagaaagggaaaaaagtggggatgaggaaggtagaggaaaagagaaagcggccaaacaatggtttggttgggctgtgtttcagagtataccaccctttaaaattctgatcaaatactcttgacccataaacccttagcccttgttctgatggggtagccacaggagtccaccagctgggaatcatccactgagctctggatcagagcattctagaggctggaatgtcgggggagttttaggggtagttttccggtcattcctaaaaccatccgtcctaactcccaggcaggtttaaatagtgcaaactcttaggcagagagctcccagctgcatagtttcacaggtgagtgtcccaagccagggcctccaggaaacaggtcnnagagtanccaggggtccaaagccncttcgntgaanngaaatctaaaggtgaagagaggggaggccagggcacagagtaaagctcctgggctaanccagtgnccaagccagaaancaatgcngggcagaanagggttacaaggcaggtagtctggacactggattcaacagcttgccatcagccagggaaagtgaagctgaggatgcatatggagcagggccaggaagatcaggagagctgagggagaacaggaaaattgggaggaaggaagaggcagctcagcagcaaactccagnagaaatanccagcnnnnntnnnnnntttgtgattgtctcttaaaaagatttattttctcttcttgcctgaatgtacaaaggcaaaaagagtacagtttgtatatatatatatttatatatatatataaaaaaacaaggaacttggtaatgtacactttacagaagggaagaatcaggaagactgaaattaaattcaacagagcaacgccaatggaacaaaatctatgaacagcaacactgcccctccagcccgggcctccagctcgccccaacctgctcccaatgggagggctgagcaccaaggcaagcgggtgggctggggcangaggggctggggacagggcctgggaggggcttgatcccaggaggggggcccatggtaggagatcactggaaagcttcctgggatgcccaagtaattaaaacaaacaacaaaggcccagaattatggggccaactagctgcccagttgcatcttgggggcatcagagtagacaaggggatggtgagagggtatacgggataagtgacatgggtggcctcaaagcctgtatgaaataattctctagccctctgcagtcttaactcgcaactntaagtcctgccatggccccttaaacgtggaaaaaagagactcaagaaatcaccatttcatttcatagggtgccctcttacccttctaagcgtgtggttctttgaccttgtgatgtgtggagagagttcggtaagagaaggaaatttcatacatgtacatgtacaaggcaggaaaaggggatgaagggaactgccataccttaaaatgaggaagtagttgatgtggatcctaaagagcagctctccaagccttgcctgatctatctggggatgaggccccctccctctttagcttctcctctatgggaagccccgtgagcaatgtctgtgagggcctgggcaggggtggctcataaacaggcttggtctggtggtcttggcccttggtagcaaatttttccagcctttgtttgtggggtgggataggatggggacccctgctgagcatctcatccctctgactaggtcatggatgccacaggtagctcccacctgtgtttctcctccccatgtagaggtgggcagcaaatctttcactcagcacttgtcaagaatctccacagctgctgcttcatgttatttcagagggaagactaggcccggcaggcatcaggatctgccatggtggctttcacctgctcttctgagcagctcctactcttcaggggagacttngannngaggatcaaagagccaaatgtttaagaagaaaaattaaaaaggaaaagaaaaacctgttctcttctggagaacccaaggctgcccagctaatacagaagttcgtcctctgtgttacagaatgagtggaaagggcaggaatgcagggccatgcctgcccaatgcaaaagaaaattactcctaacggtttctttacaatatatacagagtatgctgcaggccagtgccacagatacaaaacacacaacaatatttaaaaacaaacaggaacagagagggaaccttggctccacctcacaggagccccaggagggcataatcaggctgaaattcagtcaccctcttggttggggtgactcaggtggggtgggatgacggtgtctgcactagctacttccacggaggaaagggaggtcactgctcagagcactgcccatgagggcagcagaaggcagacggaatgatgggtatgagggaggctgttttggggccctgccaagaggtctaaancaatggtttttggggaggactcagaacccaacttgaacaaaaacgaggaggcagaaacctagggaaaaggcctgtagatcagaggggatcctcttgagcagatggtgaccctaagcctctcaagtgtagggttccagggtccttggaaatcaactactactgggcattgtgcttactgtcccctatttcccattttccaaactgagtcggagccaagttcctgctcctagtcacttttggcactctggtcacacactcccttttccagcctacactggtgtctgtcagtctttatctctctctctcaatccagagggtcatggaaagataggaggggagaacagagggatgatacctcaaaagccaagtaagctaagctccccacaccttggggaagacatgaccccaataaagctaccaaatcatcctcactttcccagtacaaagagtataaagcttccattgggagactgcatttctaaggagagcagagaaatgttggctgcctcaaagcacagctccactgagtacattctgagactctaataagtaatggcttggatgtgttattccagggtctaaggaacaaataacctcccatggccagtggcccctcaaacaaaatatgtgttaccaagaaacacagcttatattggcccacatggaggttatagactgagctatataaaatcatgtacttgtagacagaggaattgggctgtatatatctgtggcctcaaatgaggaagatatcagatggctagatgacaggacatctccaagaactgctgggtgctcccaggggctgccttctgggccttgccctaaggtgacctggcanactccaaggttccccaagctggggggaatactagtttatctgcctgaggcttaanagccaagcagtggaaaagaanaggcaagaccagtgtggggatccccctgggaaaggcaccaaggggttaggagggaagggaaaagggcaaggagttggggaataanaagcagcaggacttagtggggacgcaggttctacttcacagacgtcattcatgctccagcaccagcttnctcccagtgtccctggggagccctgtgctggtgttggaacccctgccccctgcctcacaggcagctcaaggccatgttggggcanatgccttggtcttcctttccaggctaggttgtgagcgtttatatgtgctcatgtaaatggggagaagtctccacatttgaagaccttgttttcacaattatgtagaaaacaacccccaatttctttcctgagattctagttcctccacatgctgccaattcccagggtgcaaagcactagggagatgcagaatctggtgatggtggtaatgatggtgaggggtatggctgctgtgctgtcttcagaccttacccagtgcttgggggtgggggtccctccctggtgggcgggggggctggtactgctccagcagcagaccaagggcttggggaacagagcagtggcttctctgggctgaggccatgttcccctggttgcttcccgtgccttcatctccacagaggccacaatagtcataactgtggctgagagaataaatatttttgctaagtaccagctctccagctcctgaggaagaggtagggtcaggtagtccnggaggtctnggtggaggtgagatagccaagggtctgccttcagtcatggtggaaacggcaaacaggatgatcaacaccatttaactgatgtctaaacggcaccttcagcacctccttgggtaagccagtccgggcccgtgaagctgactttatccgggcacttggtgtcattctcacctcctggggggtgggtagagtgagggagttgagccttgttggctggcaacaatggctgtagaagaaagccctgctgcatagggtaagttgtactgtgctgggagcaatgagtaccccaagtggtggtggtggtggtgtgtggacatcaggcgctgggaaggagaggtgcggggccggtcaacactccgttcacccccacttgctcccccgacgctgctacagctgccaccacccccaaccaccccacagcctcctcgatctctctcctgagaagttttatcacttatcgtgggagacttgctcttgtagtgactggcatgctgctgcaagatgtccagggctttggactctgagctggatttacaagtcacactggggctggctcgtgccttgtcagcatcttcaccacctgagaccttgctgccatatggggaaaaagagtagctggaaggcaggtaggaacctgggtagttctgcatcatcacagcaggcatgctccggtagctggggtggttggggtcgtaggactgactgtaggaatagccgtgcatgtaggggatgtaggactggtgctgggtnagtggggaggacacaggcacatggacacttggccggggctccttgctcccaaggcgagactcctctgacgtgggcagcttgcagtcactacttgtgctttccttcccatcttccttggggacagagtccttactccgactcctttcctccttcaatttgcggtcccgctcctccttccnccgctcatcctctgacttgatgtctgagtacttggcaggataaacatatgtccacatccggggctctgcctcctgtcggtaccagagtattggatccatctctgcctgtcgaccacactcagcacctgtcttggcctcagaggcctccttgcttaggtggctggcatcactcagcttcactttaaggccttcaggggcctggcccgggagttttgaagagtcatctaacttgggaatgatgactgatttggctgggtcagcccctggctccttggccttgccaggtcctgatttcaccaggtctgtcaggctgggggccttggtgagagttggtggaattgacggcttttgcttccactcttccttgagtgctgcctcccgctccttcaggcccatctctgccttcttgtccactccccgctgctgctgctctaagctctggcgtttctgctgttcttcgtactgctgccggtaagccgtgttagtgctcagaaggtgggtgtggtaactctggtcgctgtagccataggggggtacataggcatactggttgtagtacagggactgcatgtacatattgggacgctgctggatgaccgagggctgctgactggaactgctcagctcgggcttcttttcttcacagatatcgttcttcactttcccttctatgctctcaggttcctcatccctttttgtcttcagggcnctggctctccactcctgcctggctgctggggttcagagccccagggctggactgtgcataacttggagaatagtaactctcaaagccttggtaatatggtgagtctttgctctgaggctgagggggaaanagagttttcttagccccttctttaaccaactgttcggcgtccttngntttgacactgtctaccttgccctccccatcctccccagcatcagagatgtcagagtatgcagggccagtccgttcgactgagctggcttcagctccattctgggtcaccacatgtaagggagtcaggggctgagtaggggtagtgttttcaaggcggctactgcctccaatggaagggctgggggcattgtccgtgaaactgtagatcttgtcggcttcagccttgatgctagccagtcggctttggtgggggtctgatgagccatttaggagcccctccattttcatcccatctcctgaagattccctgaatgggcttttgccttcctctgctcgacacaccttcccaggggtcagaggactttcaagttcctttgaagattccttcttttttttgtctttctttttcttgtccttggctggagtcaaggcagggttgactgtgaaaggttctcccataacagtgggcttgggctgaatgggcttgagttggggactgttgggcatggcttgtgccactgtggcggtcaagcctgaggaagagcctgggctcgctgctgtgaaggtggctgtctggaaggtgtagatttgctgtggggggatggcaggggcaatgggacgggctgactttaggctcttggaaggaatcttttcaggttttaaactagagggttttttacatttttctttttccatacacttcctttctaaagaatcaaaggcatcattgcttgtttcatccatcactgagggtccatcatcagagccatcattggataaggccccaaggtctgtgtccccttccccactcaactttttcttacagaggccttttgtgctgaatttgcttgaaggagaagggctatggggctctacaagtcgaactttgggggtagctgagcgggcaggggacaaggaacctttttgtgagacagatgcaccgttgcagctcccaagatctgcatggagaataggttcctctccgtactcactgtccccatccgcttccggcttgctgtcatcatctgtatgggcatgagcttggtggtacttaagtccattgatgtgcttgtacttcttgttgcagtttgggtggggacagtcaattaggacgggggaggggcagtttctgtccagaacagtgggttctacctttgtcccaggaagggggccagtggctgagcccatggaattagtacggacacgcttgctccctttggagtcctctgagctagaattcagctccatgtctgaaaggggtttgtttttccgcttattagctgaggaagggctggccttg

SEQ ID NO: 385 - DNA, 1366 bp, Homo sapiens
  misc_feature (19)..(19): n is a, c, g, or t
  misc_feature (21)..(21): n is a, c, g, or t
  misc_feature (23)..(23): n is a, c, g, or t
  misc_feature (27)..(27): n is a, c, g, or t
  misc_feature (86)..(94): n is a, c, g, or t
  misc_feature (341)..(341): n is a, c, g, or t
  misc_feature (564)..(564): n is a, c, g, or t
  misc_feature (630)..(630): n is a, c, g, or t
  misc_feature (1115)..(1115): n is a, c, g, or t
  misc_feature (1122)..(1122): n is a, c, g, or t
  misc_feature (1124)..(1124): n is a, c, g, or t
  misc_feature (1128)..(1128): n is a, c, g, or t
  misc_feature (1193)..(1193): n is a, c, g, or t
  misc_feature (1202)..(1202): n is a, c, g, or t
  misc_feature (1218)..(1218): n is a, c, g, or t
  misc_feature (1221)..(1221): n is a, c, g, or t
  misc_feature (1227)..(1227): n is a, c, g, or t
  misc_feature (1258)..(1258): n is a, c, g, or t
  misc_feature (1260)..(1260): n is a, c, g, or t
  misc_feature (1270)..(1270): n is a, c, g, or t
  misc_feature (1274)..(1274): n is a, c, g, or t
tgatatgtaaaattttacntntntttntttttttttttttttttttttttgaggaataaaaacatttatctatgtattcagaatcnnnnnnnnnttacctttacagttcaatttactatatagaaatcattgggttttatatttgcagttaacttttgaactgagattacaatattataacaaaaaactttacattaattcagaactttttagcataccaaattgaaatacataggttcaaatttcagatttatggcaaacagtcttcaaatacaatacagacatttcttaaaagttaccgtatcattcacatgtgatatttgcaactctgagctatttcntatagaacagctctcctgcagatatggcaaagttgatatgccatgaagttcaaggcctgtatagtcaagccaaggactcaaagttgcaccatctttaaaaaggtttggcatttctggaccacaacaatgcacaacatgtaaagaaggtaggaaacagttccccctccttgttaaatggttaaaaaaagttacatggtagcttggaattttgcataaaaccccnataatataccttggaaaagtccaagggcaatttgatggcaatggattggggccctatatatatatntttttaatagaacccatgagatttaaatgggcattaatcaaatcaaaaaatattaagcacctactggtttaagagatttaaatttattagagattcatgatcaatttctttccacctcgaaatcaaggtgtaaaaaccagctattaagtgcattccaaacttctcctatgtagcacaggtagaattttctgtccattggcaccaaagtgaagtcacatttcctcttgggagacagaaattccacacctgaacacagagtaagttaggaaaaaatgacccctgttgtttattactattgtgattctgagatctaggatttctaatatactagcagtaaacaaagcaaattcctggcaacaactgtcaggttagtgatgctaactcccttcccccaaccaccataaaattttagtaagaaaagaattaaaagtaatgactaagcagaacaaattggaaataacaagaaactaaggggacagttcaanccaacancnaaanatcctaaatttgaaatcactgcaactgaagataataagtgtgcttcaccccaacccccatcccanctctgaatnttaaacattccgtgcnaangagcancaggtttctggataaagatgtagcccttctntnagttttagtnctcntgcagttttctgcaattttatttccctccccccaagtttattcaaagtatttaacagaatcttccatttcagccaaagattgtgattcaaag

SEQ ID NO: 386 - DNA, 7427 bp, Homo sapiens
  misc_feature (2089)..(2089): n is a, c, g, or t
  misc_feature (3892)..(3892): n is a, c, g, or t
  misc_feature (5584)..(5584): n is a, c, g, or t
  misc_feature (5620)..(5620): n is a, c, g, or t
  misc_feature (5837)..(5837): n is a, c, g, or t
  misc_feature (5846)..(5847): n is a, c, g, or t
  misc_feature (5911)..(5912): n is a, c, g, or t
  misc_feature (5915)..(5915): n is a, c, g, or t
  misc_feature (5941)..(5941): n is a, c, g, or t
  misc_feature (6175)..(6176): n is a, c, g, or t
  misc_feature (6281)..(6281): n is a, c, g, or t
  misc_feature (6653)..(6653): n is a, c, g, or t
  misc_feature (6660)..(6660): n is a, c, g, or t
  misc_feature (6676)..(6676): n is a, c, g, or t
  misc_feature (6688)..(6688): n is a, c, g, or t
  misc_feature (6694)..(6694): n is a, c, g, or t
  misc_feature (6822)..(6822): n is a, c, g, or t
  misc_feature (6979)..(6980): n is a, c, g, or t
tcgagagcgccgcgaagaggcagcggggcgcgggtggattggggctggaggtgcgcgtcccgtggggtggcaaggcggcactcctggcgctgcgggcgtccccacaggaacagactttgacccagaacacagaacctcacttgtcaacaagaaccttctggaagagaagactggcagaatattttttaagtactaagacttgcctgcgatgtggtctctgcacatagtactaatgaggtgctccttcagattgaccaagtccttggccacaggtccctggtcacttatactcattctcttttctgtacaatatgtatatgggagtggaaagaaatacattggtccttgtggaggaagagattgctctgtttgccactgtgttcctgaaaaggggtctcggggtccaccaggaccaccagggccacagggtccaattggacccctgggagccccaggacccattgggctttcaggagagaaaggaatgagaggggaccgcggccctcctggagcagcaggggacaaaggagataagggtccaactggtgttcctggatttccaggtttagatggcatacctgggcacccagggcctcctggacccagaggcaaacctggtatgagtggccacaatggctcaagaggtgacccagggtttccaggaggaagaggagctcttggcccaggaggccccctaggccatcctggggaaaagggagaaaaaggaaattcagtgttcattttaggtgccgttaaaggtattcagggagacagaggggacccaggactgcctggcttaccaggatcttggggtgcaggaggaccggcaggtcccacaggatatcctggagagccagggttagtgggacctccgggccaaccagggcgtccaggtttgaagggaaatcccggtgtgggagtaaaggggcaaatgggagacccgggtgaggttggtcagcaaggttctcctggacccaccctgttggtagagccacctgacttttgtctctataaaggagaaaagggtataaaaggaattcctggaatggttggactgccaggaccaccaggacgcaagggagaatctggtattggggcaaaaggagaaaaaggtattcctggatttccagggcctcggggggatcctggttcctatggatctccaggttttccaggattaaagggagaactaggactggttggagatcctgggctatttggattaattggcccaaagggggatcctggaaatcgagggcacccaggaccaccaggtgttttggtgactccacctcttccacttaaaggcccaccaggggacccagggttccctggccgctatggagaaacaggggatgttggaccacctggtcccccaggtctcttgggcagaccaggggaagcctgtgcaggcatgataggaccccctgggccacaaggatttcctggtcttcctgggcttccaggagaagctggtattcctgggagacctgattctgctccaggaaaaccagggaagccaggatcacctggcttgcctggagcaccaggcctgcagggcctcccaggatcaagtgtgatatactgtagtgttgggaaccccggaccacaaggaataaaaggcaaagttggtcccccaggaggaagaggcccaaaaggagaaaaaggaaatgaaggactctgtgcctgtgagcctggacccatgggcccccctggccctccaggacttcctgggaggcaggggagtaagggagacttggggctccctggctggcttggaacaaaaggtgacccaggacctcctggtgctgaaggacctccagggctaccaggaaagcatggtgcctctggaccacctggcaacaaaggggcgaagggtgacatggttgtatcaagagttaaagggcacaaaggagaaagaggtcctgatgggcccccaggatttccagggcagccaggatcacatggtcgggatggacatgctggagaaaaaggggatccaggacctccaggggatcatgaagatgcgaccccaggtggtaaaggatttcctggacctctgggccccccaggcaaagcaggacctgtngggcccccaggactgggatttcctggtccaccaggagagcgaggccacccaggagttccaggccacccaggtgtgaggggccctgatggcttaaagggtcagaaaggtgacacaatttcttgcaacgtaacctaccctgggaggcatggccctccaggttttgatggacctccaggtccgaagggatttccaggtccccaaggtgcccctgggctgagtggttcagatgggcataaaggcagacctggcacaccaggaacagcggaaataccaggtccacctggttttcgtggtgacatgggagatccgggttttggaggtgaaaaggggtcctcccctgttgggcccccaggccctcccggctcaccaggagtgaatggtcagaaaggaatcccgggagaccctgcatttggtcacctgggacccccgggaaagaggggtctttcaggagtgccagggataaaaggacccagaggtgatccgggatgtccaggggctgaagggccagctggcattcctggattcctaggtctcaaaggtcccaaaggcagagagggacatgctgggtttccaggtgtcccaggtccacctggccattcctgtgaaagaggtgctccagggataccagggcaaccgggactccctgggtatccaggtagcccaggtgctccaggtgggaaaggacagccgggagatgtggggcctcccgggccagctggaatgaaaggcctccccggactcccaggacggcctggggcacatggtcccccaggcctcccaggaatcccaggtccctttggagatgatgggctacctggtcctccaggtccaaagggaccccgggggctgcctggtttcccaggttttcccggagaaagaggaaagcctggtgcagagggatgtcctggcgcaaagggagaacctggagagaagggcatgtctggccttcctggagaccggggactgagaggggccaaaggagccataggacctcccggagatgaaggagaaatggctatcatttcacaaaagggaacacctggggaacctggacctcctggagatgatggattcccaggagaaagaggtgataaaggaactcccgggatgcaagggagaagaggagagctgggaagatacggaccacctggatttcacagaggggaacctggtgagaaaggtcagccagggcctcctggacccccaggccctccaggctcaactggtctaagagggttcattggttttccaggacttccaggtgaccagggtgagccaggttctccaggtccccctggattttcaggaattgatggagcaagaggacctaaaggaaacaaaggtgaccctgccagtcactttggtccacctggtccaaagggtgagccaggtagccctggatgtccagggcattttggagcatccggagagcagggcttgcctggtattcaagggcccagaggatcacctggaaggccagggccacctggctcctctggaccaccagggtgcccaggtgatcacgggatgcctgggctgaggggacagccaggagaaatgggagaccctgggccaagaggcctccagggggatccagggataccaggtcctccgggaataaaaggtccctccggatcacctggcctgaacggcttgcatggattgaaaggtcagaaaggaactaaaggtgcttcaggtttgcatgatgtggggccacctggtccagtgggaatacctgggctaaaaggggagagaggagaccctgggagcccaggaatctctcctccaggtcctcgtggaaanaaaggtcccccaggacccccagggagttcaggaccacctggtcctgcaggtgccacaggaagagctcctaaggacattcctgacccgggtccacctggagatcagggacctcctggtcctgatggcccaagaggagcacctgggcctccaggcctccctgggagtgttgaccttctgagaggggagccaggtgactgtggtctaccagggccaccaggtccccctggcccaccaggccctccaggatacaaaggctttccaggatgtgatggaaaagatggccagaaaggaccaatgggattcccgggaccgcagggaccacatggatttcctgggccacctggagagaagggtttacctggacctccagggagaaaagggcccactggtcttccaggtcccagaggtgaaccggggccacctgcagatgtggatgactgtccccgaatcccaggccttcctggggcgccaggcatgagaggaccagaaggagccatggggctccctggaatgagaggccccccaggaccagggtgcaaaggagagcctgggctggatggcaggaggggtgtggatggcgtccctgggtctcctgggcctcccggacgtaaaggtgacacaggagaagacggctaccctggaggaccagggcctcctggtcccattggggatcctgggcccaaagggtttggccctggatacctcggtggcttcctcctggttctccacagtcagacggaccaggagcccacctgccccctgggcatgcccaggctctggactgggtatagtctgttatacctggaagggcaagagaaagctcacaatcaagaccttggtctggcagggtcttgccttcccgtatttagcacgctgccctttgcctactgcaacatccaccaggtgtgccactatgcccagagaaacgacagatcctactggctggccagcgctgcgcccctccccatgatgccactctctgaagaggcgatccgcccctatgtcagccgctgtgcggtatgcgaggccccggcccaggcggtggcggtgcacagccaggaccagtccatccccccatgtccgcagacctggaggagcctctggatcgggtattcattcctgatgcacacaggagctggggaccaaggaggagggcaggcccttatgtcacctggcagctgcctggaagatttcagagcagcaccattccttgaatgccagggccggcagggaacttgccactttttcgcaaataagtatagcttctggctcacaacggtgaaagcagacttgcagttttcctctgctccagcaccagacaccttaaaagaaagccaggcccaacgccagaaaatcagccggtgccaggtctgcgtgaagtatagctagagaatgcgaaattcaccaacacgtggccaagagaaacttcctagggggctaagacttcctagactgtgctaagagatgtcatggtgctcattttggactccctttcagtggttccttctgttttgtcgtggttattcccagagtcctctgttccttacacattaagcaaatgctgcacagatggatttgtttggacctcccaatctagggagcctagatactcttattttactgaggatgatcgaagaactggctttacttaaaaatatgctaattctcagaaaggcaagtagatgataaagnccagattacaaattacattactgaaaacttcattcnttgggttaacagtatctcaaacaattgaagtcaattactctataatacagtgggcttctggatggattttataggaaaaaataaacaggtcaatgaatgaaactagaaagcagagattttcaacatttcaaaatgatttcctctgtaatctatttttccatatactttaaataatggtaaaaccatgacgcaaagagagatttttttttaaagaganaaaaaaaannttcacactgccagcgttaacagttcctttcaaaggagaatgaatcatgatggcaggaaggcccnnacnagtcgccgtattccagagatgcgacnttagcataaacacatcacagatgaatataaaacattatgttctcttctgcatttttcagagaatagaaatgcctactttggcaacccttttgaaaagtagcaattatggaaaaaaaaatattcaataagagattaggagcctaaaagctattagtgaatattaaggtagttattcacaaaaattgactccccattgcagtgaacttccagacagactgcttttccccagtcggnntccggcgtgtcacaggtgcgtgcgtgctaatgggactgacgctacatggggctcactcaggcaggcacgcgcttcatacaaagcatctcactcccctccccaggngagcctgcacagcttcttgcactcacaacggacactttgctccacacacataatggcagctcacacagggacgtgacagagctatcattatcgacttgggagaaaattaagggccgatttaattaaacttaggtaagaagattcatttaagtcagggttaccccatcaggaggacatggctctatctttaaacgaaacaaagacaatttataatttgaattttatgcctcccgtggttggctgttacaggagcatccattttgccaattttaaagacattcttatatttcatatcagtcttgtaccaaggcaacagtttgacatttggcattagtattttctaaaaaagtttagaatgtgtgtcaatttatnaatgatnatttttttctgtaaangcaaaagatccntttttntgttttgctaggaatttggtgatctaatcctaaatttaaaagatttgttggaaaaaatttttaggaaactcaccttcctcatctaaaagaaaaaggcattttagagaaaactaaagaaatttctcatngagcgtgacactcattttagtgctttgtttccgtgcacttaaaaataattgagaagaaaaactcaattaaaattttgtttataagaaatgttttccttgccaaaccttgatttgtaatgagctcttatatgcagaacacatttcaaatgagttttgnnctatgggctgcccccagggtggcaatttattttaagagtattttctggtaaaaagaaaaatgtgtattttaagatgaaatattttcttgatgtagcagaatatttcctagttcatttgacccatttgatattttttaaaccatgctctggcatgttgaatatttttgtgcacctaaaacttaagccaatttcaatcttatttgtgattacctttctccttcccaaaaagctttatctattaccaaaagtcaaccctcctaaaagttcaacctgttcatcttgaacttggcctgagaacattttctgggaagaggtaagggtgacaaatggaacatcagaaacgtatcttgcttgctaattattttaaacactttaatgttggtattagaatattatcttcataagttaataaataagtaaaaaaaaaaacccacacaaaaacagccg

SEQ ID NO: 387 - DNA, 2644 bp, Homo sapiens
gctactcctcccccaagagcggtggcaccgagggagttggggtggggggaggctgagcgctctggctgggacagctagagaagatggcccaggctggggaagtcgctctcatgccttgctgtcccctcccctgagccaggtgatttgggagaccccctccttccttctttccctaccgccccacgcgcgacccggggatggctccgtggcctcacgagaacagctctcttgccccatggccggacctccccaccctggcgcccaataccgccaacaccagtgggctgccaggggttccgtgggaggcggccctagccggggccctgctggcgctggcggtgctggccaccgtgggaggcaacctgctggtcatcgtggccatcgcctggactccgagactccagaccatgaccaacgtgttcgtgacttcgctggccgcagccgacctggtgatgggactcctggtggtgccgccggcggccaccttggcgctgactggccactggccgttgggcgccactggctgcgagctgtggacctcggtggacgtgctgtgtgtgaccgccagcatcgaaaccctgtgcgccctggccgtggaccgctacctggctgtgaccaacccgctgcgttacggcgcactggtcaccaagcgctgcgcccggacagctgtggtcctggtgtgggtcgtgtcggccgcggtgtcgtttgcgcccatcatgagccagtggtggcgcgtaggggccgacgccgaggcgcagcgctgccactccaacccgcgctgctgtgccttcgcctccaacatgccctacgtgctgctgtcctcctccgtctccttctaccttcctcttctcgtgatgctcttcgtctacgcgcgggttttcgtggtggctacgcgccagctgcgcttgctgcgcggggagctgggccgctttccgcccgaggagtctccgccggcgccgtcgcgctctctggccccggccccggtggggacgtgcgctccgcccgaaggggtgcccgcctgcggccggcggcccgcgcgcctcctgcctctccgggaacaccgggccctgtgcaccttgggtctcatcatgggcaccttcactctctgctggttgcccttctttctggccaacgtgctgcgcgccctggggggcccctctctagtcccgggcccggctttccttgccctgaactggctaggttatgccaattctgccttcaacccgctcatctactgccgcagcccggactttcgcagcgccttccgccgtcttctgtgccgctgcggccgtcgcctgcctccggagccctgcgccgccgcccgcccggccctcttcccctcgggcgttcctgcggcccggagcagcccagcgcagcccaggctttgccaacggctcgacggggcttcttggggagtttcttaggcctgaaggacaagaagcaacaactctgttgatcagaacctgtggaaaacctctggcctctgttcagaatgagtcccatgggattccccggctgtgacactctaccctccagaacctgacgactgggccatgtgacccaaggagggatccttaccaagtgggttttcaccatcctcttgctctctgtctgagagatgttttctaaaccccagccttgaacttcactcctccctcagtggtagtgtccaggtgccgtggagcagcaggctggctttggtaggggcacccatcacccggcttgcctgtgcagtcagtgagtgcttagggcaaagagagctcccctggttccattccttctgccacccaaaccctgatgagaccttagtgttctccaggctctgtggcccaggctgagagcagcagggtagaaaagaccaagatttggggttttatctctggttcccttattactgctctcaagcagtggcctctctcactttagccatggaatggctccgatctacctcacagcagtgtcagaaggacttcgccagggttttgggagctccagggttcataagaaggtgaaccattagaacagatcccttcttttccttttgcaatcagataaataaatatcactgaatgcagttcatcctcggcccactttccctccgtttgttttcttttcataatccacttactcccttcccttctactctgcgctggcttttgacagaggcagtaaattaggcctaatcctcactcttttcttcctaatcttcatcaaacaaaaaatgaaaagtctgtctggacgaaggggagtgagcttgagcctttgatatcttgctcccccacccttcctgaaactcttgaaatccagttgccattgagtagcaaagccacgctccccacaggacttggacagagggcccacagggggatgggctggctgtggccaggtttagggcagggggcatttgtcccctccatgctataatccagtggtgccttacatggtgtgtgtgtgtgtgtgtgcgtgtgtgtgtgtgtgtgtgtgtctggaggcacaggcacaaagcattgcttgggttggtcaaatgtcttgtgtcataaatatattctgatgtttcccagcctttccacaacctctaccttcccactcaccttccccagctacaaaaatctgtattatcctcttaaagtaaaactggagttac

SEQ ID NO: 388 - DNA, 3503 bp, Homo sapiens
atggggggatgcacggtgaagcctcagctgctgctcctggcgctcgtcctccacccctggaatccctgtctgggtgcggactcggagaagccctcgagcatccccacagataaattattagtcataactgtagcaacaaaagaaagtgatggattccatcgatttatgcagtcagccaaatatttcaattatactgtgaaggtccttggtcaaggagaagaatggagaggtggtgatggaattaatagtattggagggggccagaaagtgagattaatgaaagaagtcatggaacactatgctgatcaagatgatctggttgtcatgtttactgaatgctttgatgtcatatttgctggtggtccagaagaagttctaaaaaaattccaaaaggcaaaccacaaagtggtctttgcagcagatggaattttgtggccagataaaagactagcagacaagtatcctgttgtgcacattgggaaacgctatctgaattcaggaggatttattggctatgctccatatgtcaaccgtatagttcaacaatggaatctccaggataatgatgatgatcagctcttttacactaaagtttacattgatccactgaaaagggaagctattaacatcacattggatcacaaatgcaaaattttccagaccttaaatggagctgtagatgaagttgttttaaaatttgaaaatggcaaagccagagctaagaatacattttatgaaacattaccagtggcaattaatggaaatggacccaccaagattctcctgaattattttggaaactatgtacccaattcatggacacaggataatggctgcactctttgtgaattcgatacagtcgacttgtctgcagtagatgtccatccaaacgtatcaataggtgtttttattgagcaaccaaccccttttctacctcggtttctggacatattgttgacactggattacccaaaagaagcacttaaactttttattcataacaaagaagtttatcatgaaaaggacatcaaggtattttttgataaagctaagcatgaaatcaaaactataaaaatagtaggaccagaagaaaatctaagtcaagcggaagccagaaacatgggaatggacttttgccgtcaggatgaaaagtgtgattattactttagtgtggatgcagatgttgttttgacaaatccaaggactttaaaaattttgattgaacaaaacagaaagatcattgctcctcttgtaactcgtcatggaaagctgtggtccaatttctggggagcattgagtcctgatggatactatgcacgatctgaagattatgtggatattgttcaagggaatagagtaggagtatggaatgtcccatatatggctaatgtgtacttaattaaaggaaagacactccgatcagagatgaatgaaaggaactattttgttcgtgataaactggatcctgatatggctctttgccgaaatgctagagaaatgggtgtatttatgtacatttctaatagacatgaatttggaaggctattatccactgctaattacaatacttcccattataacaatgacctctggcagatttttgaaaatcctgtggactggaaggaaaagtatataaaccgtgattattcaaagattttcactgaaaatatagttgaacagccctgtccagatgtcttttggttccccatattttctgaaaaagcctgtgatgaattggtagaagaaatggaacattacggcaaatggtctgggggaaaacatcatgatagccgtatatctggtggttatgaaaatgtcccaactgatgatatccacatgaagcaagttgatctggagaatgtatggcttgattttatccgggagttcattgcaccagttacactgaaggtctttgcaggctattatacgaagggatttgcactactgaattttgtagtaaaatactcccctgaacgacagcgttctcttcgtcctcatcatgatgcttctacatttaccataaacattgcacttaataacgtgggagaagactttcagggaggtggttgcaaatttctaaggtacaattgctctattgagtcaccacgaaaaggctggagcttcatgcatcctgggagactcacacatttgcatgaaggacttcctgttaaaaatggaacaagatacattgcagtgtcatttatagatccctaagttatttacttttcattgaattgaaatttattttgggtgaatgactggcatgaacacgtctttgaagttgtggctgagaagatgagaggaatatttaaataacatcaacagaacaacttcactttgggccaaacatttgaaaaactttttataaaaaattgtttgatatttcttaatgtctgctctgagccttaaaacacagattgaagaagaaaagaaagaaaaaacttaaatatttatttctatgctttgttgcctctgagaataatgacaatttatgaatttgtgtttcaaattgataaaatatttaggtacaaataacaagactaataatattttcttatttaaaaaaagcatgggaagatttttatttatcaaaatatagaggaaatgtagacaaaatggatataaatgaaaattaccatgttgtaaaaccttgaaaatcagattctaactgattgtatgcaactaagtatttctgaacacctatgcaggtcttatttacagtgttactaagggaacacacaaagaattacacaacgttttcctcaagaaaatggtacaaaacacaaccgaggagcgtatacagttgaaaacatttttgttttgattggaaggcagattattttatattagtattaaaaatcaaaccctatgtttctttcagatgaatcttccaaagtggattatattaagcaggtattagatttagaaaacctttccatttcttaaagtattatcaagtgtcaagatcagcaagtgtccttaagtcaaataggtttttttttgttggtggttgtgcttgctttccttttttagaaagttctagaaaataggaaaacgaaaaatttcattgagatgagtagtgcatttaattattttttaaaaaactttttaagtacttgaattttatatcaggaaaacaaagttgttgagccttgcttcttccgttttgccctttgtctcgctccttattcttttttggggggagggttatttgcttttttatcttcctggcataatttccattttattcttctgagtgtctatgttaacttccctctatcccgcttataaaaaaattctccaacaaaaatacttgttgacttgatgttttatcacttctctaagtaaggttgaaatatccttattgtagctactgtttttaatgtaaaggttaaacttgaaaagaaattcttaatcacggtgccaaaattcattttctaacaccatgtgttagaaaattataaaaaataaaataattttaaaaaaaaaaaaaaaaaaaaaaa

SEQ ID NO: 389 - DNA, 1894 bp, Homo sapiens
cgcaaacagggcgagaggtcgctgggcagcgttcgaggaccagagggagctcggccacagaagaccccagtgatctgatcccgggatcccggctccaagctctcctcgcattttacagatttcacccccgcgactatctccccaaaacggagcctttatatcaagagaaggtgcgggagctggggcaaccaggactttctcgggcacccaagatgcgctccattaggaagaggtggacgatctgcacaataagtctgctcctgatcttttataagacaaaagaaatagcaagaactgaggagcaccaggagacgcaactcatcggagatggtgaattgtctttgagtcggtcacttgtcaatagctctgataaaatcattcgaaaggctggctcttcaatcttccagcacaatgtagaaggttggaaaatcaattcctctttggtcctagagataaggaagaacatacttcgtttcttagatgcagaacgagatgtgtcagtggtcaagagcagttttaagcctggtgatgtcatacactatgtgcttgacaggcgccggacactaaacatttctcatgatctacatagcctcctacctgaagtttcaccaatgaagaatcgcaggtttaagacctgtgcagttgttggaaattctggcattctgttagacagtgaatgtggaaaggagattgacagtcacaattttgtaataaggtgtaatctagctcctgtggtggagtttgctgcagatgtgggaactaaatcagattttattaccatgaatccatcagttgtacaaagagcatttggaggctttcgaaatgagagtgacagagaaaaatttgtgcatagactttccatgctgaatgacagtgtcctttggattcctgctttcatggtcaaaggaggagagaagcacgtggagtgggttaatgcattaatccttaagaataaactgaaagtgcgaactgcctatccgtcattgagacttattcatgctgtcagaggttactggctgaccaacaaagttcctatcaaaagacccagcacaggtcttctcatgtatacacttgccacaagattctgtgatgaaattcacctgtatggattctggcccttccctaaggatttaaatggaaaagcggtcaaatatcattattatgatgacttaaaatataggtacttttccaatgcaagccctcacagaatgccattagaattcaaaacattaaatgtgctacataatagaggagctctaaaactgacaacaggaaagtgtgtaaagcaataaagcacattttgaaacaaacaatatgcacttcttttctgagatgcttccgaagatttgaaaataggatccaaaacacggctgggtttcagcatccaccaatgaactgaaaggtgaataaaggacgttcatgagaaatcgactaccagctgatgaaatacctgcaaagtgctctaaaaattaaatattttgactttaagggtcctagtaagtgccacttccactaagaatacagtttgaatgtataatcagtagtgtttacaagatccaacagtgcactcatcattagttaacaaagcaaatatgttcatcactgtcaggctgcccacagcaacaccaagcatattagaagaggaaccccaggaacgcaactcagaccttgggaaattaaaccatccttgtcagcagaagccaagatggaagcagtttgagcaatgaaatccgtaagattaaacaactcaagtaaatgcttcagtcaggactctgagtctgatcatgaattttatgttttaatttatgtttttttttttgtcttctggaatctcttttggtttggatattgggatgcttagaaatcctttctgagatgcatatgagtgaggaaa

SEQ ID NO: 390 - DNA, 2124 bp, Homo sapiens
attccgctcttgctttccggcaggtgatggcgccccccgcggcctagaggtccagcgcccgccgcgagcagcggacagtcctcctgttgtgtccgaccgagagtcctggtgactttgaacatgctggtgccgctagccaagctgtcctgcctggcatatcagtgctttcatgccttaaaaattaagaaaaattatctacctctatgtgctataagatggtcttcaacttctactgtgcctcgaattactacccattatactatttatccccgggataaggacaagagatgggaaggagtgaacatggaaaggtttgcagaagaagcagatgttgtaatagttggtgcaggccctgcagggctctctgcagctgttcgtctaaaacagttggctgtggcacatgaaaaggacatccgtgtgtgtctagtggagaaagctgcccagataggagctcatactctctcaggggcttgccttgatccaggtgcttttaaagaactcttcccagactggaaagagaagggggctccacttaacactcctgtaacagaagacagatttggaattttaacagagaaatacagaattcctgtgccaattcttccagggcttccaatgaataatcatggcaattacattgtacgcttgggacatttagtgagctggatgggcgaacaagcagaagcccttggtgttgaagtataccctggttatgcagctgctgaggtcctttttcatgatgatggtagtgtaaaaggaattgccactaacgatgtagggatacaaaaggatggtgcaccaaaggcaacatttgagagaggactggaactacatgctaaagtcacaatttttgcagaaggttgccatggacatctagccaagcaactatataagaagtttgatttgagagcaaattgtgaacctcaaacctacgggattggactgaaggagttatgggttattgatgaaaagaactggaaacctgggagagtagatcacactgttggttggcccttggacagacatacctatggaggatctttcctctatcatttgaatgaaggtgaacccctagtagctcttggtcttgtggttggtctagactatcagaatccatacctgagtccatttagagagttccaaaggtggaaacaccatcctagcattcggccaaccttggaaggtggaaaaaggattgcatacggagccagagctctcaatgaaggtggctttcagtctataccaaaactcacctttcctggtggtttactaattggttgtagtcctggttttatgaatgttcccaagatcaaaggtactcacacagcaatgaaaagtggaattttagcagcagaatctatttttaatcaactaactagtgaaaatctccaatcaaagacaataggactccatgtaactgaatatgaggacaatttgaagaactcatgggtatggaaagagctatattctgttagaaatataagaccgtcctgccacggagtactgggtgtatatggagggatgatttacactggaatcttttactggatattgagaggaatggagccgtggactctgaaacataaaggttctgactttgaacggctcaagccagccaaggattgcacacctattgagtatccaaaacccgatggacagatcagttttgacctcttgtcatctgtggctctgagtggtactaatcatgaacatgaccagccggcacacttaaccttaagggatgacagtatacctgtaaatagaaatctgtcgatatatgatgggcccgagcagcgattctgtcctgcaggagtttatgaatttgtacctgtggaacaaggtgatggatttcggttacagataaatgctcagaactgtgtacattgtaaaacatgtgatattaaagatccaagtcagaatattaactgggtggtacctgaaggtggaggaggacctgcttacaatggaatgtaaactgcagctagccagtttctttcaagtatggcaagctaacgttaaaatgtttagagattaacagatttcagaatgtctttctgcatattactgaacagaatagtcacaaaatgattatcaaataaaaattttatactataaaaaaaaaaa

SEQ ID NO: 391 - DNA, 2216 bp, Homo sapiens
agaggggccccgcgcgcggatctcgcgagagcattagagggcggaagcgctatccgagcaggatgcggttcgtggttgccttggtcctcctgaacgtcgcagcggcgggagccgtgccgctcttggccaccgaaagcgtcaagcaagaagaagctggagtacggccttctgcaggaaacgtctccacccaccccagcttgagccaacggcctggaggctctaccaagtcgcatccggagccgcagactccaaaagacagccctagcaagtcgagtgcggaggcgcagaccccagaagacacccccaacaagtcgggtggggaggcaaagaccctaaaagacagctccaacaagtcgggtgcggaggcacagacccccaaaggcagcactagcaagtcgggttcggaggcgcagaccacaaaagacagcactagtaagtcgcatccggagctgcagactccaaaagacagcactggcaaatcgggtgcggaggcgcagaccccagaagacagccccaacaggtcgggtgcggagccaaagacccaaaaagacagccctagcaagtcaggttcggaggcgcagaccacaaaagatgtccctaataagtcgggtgcggacggccagaccccaaaagacggctccagcaagtcgggtgcggaggatcagaccccaaaagacgtccctaacaagtcgggtgcggagaagcagactccaaaagacggctctaacaagtccggtgcagaggagcagggcccaatagacgggcccagcaagtcgggtgcggaggagcagacctcaaaagacagccctaacaaggtggttccagagcagccttcccggaaagaccattccaagcccatctccaacccttctgataacaaggagctccccaaggctgacacaaaccagcttgctgacaaagggaagctttctcctcatgctttcaaaaccgaatctggggaggaaactgacctcatttctcccccgcaggaggaagttaagtcttcagagcctactgaggatgtggggcccaaagaggctgaagatgatgatacaggacccgaggagggctcaccgcccaaagaagagaaagaaaagatgtccggttctgcctccagtgagaaccgtgaagggacactttcggattccacgggtagcgagaaggatgacctttatccgaacggttctggaaatggcagcgcggagagcagccacttctttgcatatctggtgactgcagccattcttgtggctgtcctctatatcgctcatcacaacaagcggaagatcattgcttttgtcctggaaggaaaaagatctaaagtcacccggcggccaaaggccagtgactaccaacgtttggaccagaagtcctaacagaatggtatattcctctggaaaaagatgaacgtcaccaatggattgtgctgctctcgtttcagctttgatttttttgtccttgagaaccttgtcctccctgctgatttgtttctaaatcaaaagaaatgaagaaaaaagtactgtgacctgagagacaccctcctctagaatttagtggcgggtctgggctggcagaggtagggggctgctttgggctttgcacctgcactttggtgacattgttcttctgtgttccctttatttatgctggtggcttccatccgttctcctctggggtgagtggaggggtatatggaaacacggctatgaccaaagggagatcccagcctgggcagcctgcgctgctgaccaccctccctggggcccgggctctgtaggaaagttggtccttgactgtggcattgcactctgcactgtttctctctgcagacctaggggaaaactgcaggtggaagtgcttttctactaaggcctcttactttgggggggatgtgccctacagaagacatagaagatggggaaatgccaatgggcaaagagctactttgaatacataattctcttcaaagacttcagcagcaaacctaaacagcaggttaaaaaaaaagatgcttttttgggtgcaagtctaacctgtctagcatgagatcttcttgattttctgattattttatgtagcttgagacaaagtgaatcaacttccacttagttgtaccgagcataaaacagaacttgggcttcctggcagtgaggccactgtcccatcacagatttttaaaataaatatgatttgaagtagtgtgatctttcacacaa

SEQ ID NO: 392 - DNA, 2634 bp, Homo sapiens
ggcacgaggctgagtgtccgtctcgcgcccggaagcgggcgaccgccgtcagcccggaggaggaggaggaggaggaggaggagggggcggccatggggctgctgtcccagggctcgccgctgagctgggaggaaaccaagcgccatgccgaccacgtgcggcggcacgggatcctccagttcctgcacatctaccacgccgtcaaggaccggcacaaggacgttctcaagtggggcgatgaggtggaatacatgttggtatcttttgatcatgaaaataaaaaagtccggttggtcctgtctggggagaaagttcttgaaactctgcaagagaagggggaaaggacaaacccaaaccatcctaccctttggagaccagagtatgggagttacatgattgaagggacaccaggacagccctacggaggaacaatgtccgagttcaatacagttgaggccaacatgcgaaaacgccggaaggaggctacttctatattagaagaaaatcaggctctttgcacaataacttcatttcccagattaggctgtcctgggttcacactgcccgaggtcaaacccaacccagtggaaggaggagcttccaagtccctcttctttccagatgaagcaataaacaagcaccctcgcttcagtaccttaacaagaaatatccgacataggagaggagaaaaggttgtcatcaatgtaccaatatttaaggacaagaatacaccatctccatttatagaaacatttactgaggatgatgaagcttcaagggcttctaagccggatcatatttacatggatgccatgggatttggaatgggcaattgctgtctccaggtgacattccaagcctgcagtatatctgaggccagatacctttatgatcagttggctactatctgtccaattgttatggctttgagtgctgcatctcccttttaccgaggctatgtgtcagacattgattgtcgctggggagtgatttctgcatctgtagatgatagaactcgggaggagcgaggactggagccattgaagaacaataactataggatcagtaaatcccgatatgactcaatagacagctatttatctaagtgtggtgagaaatataatgacatcgacttgacgatagataaagagatctacgaacagctgttgcaggaaggcattgatcatctcctggcccagcatgttgctcatctctttattagagacccactgacactgtttgaagagaaaatacacctggatgatgctaatgagtctgaccattttgagaatattcagtccacaaattggcagacaatgagatttaagccccctcctccaaactcagacattggatggagagtagaatttcgacccatggaggtgcaattaacagactttgagaactctgcctatgtggtgtttgtggtactgctcaccagagtgatcctttcctacaaattggattttctcattccactgtcaaaggttgatgagaacatgaaggtagcacagaaaagagatgctgtcttgcagggaatgttttatttcaggaaagatatttgcaaaggtggcaatgcagtggtggatggttgtggcaaggcccagaacagcacggagctcgctgcagaggagtacaccctcatgagcatagacaccatcatcaatgggaaggaaggtgtgtttcctggactgatcccaattctgaactcttaccttgaaaacatggaagtggatgtggacaccagatgtagtattctgaactacctaaagctaattaagaagagagcatctggagaactaatgacagttgccagatggatgagggagtttatcgcaaaccatcctgactacaagcaagacagtgtcataactgatgaaatgaattatagccttattttgaagtgtaaccaaattgcaaatgaattatgtgaatgcccagagttacttggatcagcatttaggaaagtaaaatatagtggaagtaaaactgactcatccaactagacattctacagaaagaaaaatgcattattgacgaactggctacagtaccatgcctctcagcccgtgtgtataatatgaagaccaaatgatagaactgtactgttttctgggccagtgagccagaaattgattaaggctttctttggtaggtaaatctagagtttatacagtgtacatgtacatagtaaagtatttttgattaacaatgtattttaataacatatctaaagtcatcatgaactggcttgtacatttttaaattcttactctggagcaacctactgtctaagcagttttgtaaatgtactggtaattgtacaatacttgcattccagagttaaaatgtttactgtaaatttttgttcttttaaagactacctgggacctgatttattgaaatttttctctttaaaaacattttctctcgttaattttcctttgtcatttcctttgttgtctacattaaatcacttgaatccattgaaagtgcttcaagggtaatcttgggtttctagcaccttatctatgatgtttcttttgcaattggaataatcacttggtcaccttgccccaagctttcccctctgaataaatacccattgaactctgaaaaaaaaaaaaaaaaaaa

SEQ ID NO: 393 - DNA, 1270 bp, Homo sapiens
ggcacgaggctgcgccggaagtccctagccaggcctggcggtaaccttgggggcctcactgcagccgccgctgctgttggagtgggctttgcgagtctgaacgttggcggggctaggctcgttaactgccgagagcctccgggtttgcggtggaggacgctgaggcccgtggggggcaggcacccgggcgccgggcctcccagccgacatgtctctagtggcggaagccttcgtctcccagattgcagctgcagaaccttggcctgaaaatgctacattatatcagcaattgaaaggggagcaaattttactttctgacaatgcagcttctcttgcagtgcaggcctttttgcaaatgtgtaacttgcctatcaaagtagtttgtagggcaaatgcagaatatatgtctccatctggtaaagtaccttttattcatgtgggaaatcaagtagtatcagaacttggtccaatagtccaatttgttaaagccaagggccattctcttagtgatgggctggaggaagtccaaaaagcagaaatgaaagcttacatggaattagtcaacaatatgctgttgactgcagagctgtatcttcagtggtgtgatgaagctacagtaggggagatcactcatgctaggtatggatctccttacccttggcctctgaatcatattttggcctatcaaaaacagtgggaagtcaaacgtaagatgaaagctattggatggggaaagaagactctggaccaggtcttagaggatgtagaccagtgctgtcaagctctctctcaaagactgggaacacaaccgtatttcttcaataagcagcctactgaacttgacgcactggtatttggccatctatacaccattcttaccacacaattgacaaatgatgaactttctgagaaggtgaaaaactatagcaacctccttgctttctgtaggagaattgaacagcactattttgaagatcgtggtaaaggcaggctgtcatagagttatgtgttagtctcaggagtcttaacttttgaaatatgttttacttgaatgttacattagatattggtgtcagaattttaaaaccaaattactgctttttgaaacctcaaattatataatgtatcttatgtatgtgctttatattgttatttgtgtatacattaaaataattctgaattatttaatctgatatgttgtattctgtatcttgaaatttttgtttccttgaaacatgcatgcatttaaaaataaagcttaaacaactgt

SEQ ID NO: 394 - DNA, 1368 bp, Homo sapiens
cctgctttgccgaagtgggagaaaaaacagaggaaagaagagtagaaagggatattcttaaggaaatgttcccctatgaagcatctacaccaacaggaattagtgctagttgccgcagaccaatcaaaggggctgcaggccggccattagaactcagtgatttcaggatggaggagtctttttcatctaaatatgttcctaagtatgttcccttggcagatgtcaagtcagaaaagacaaaaaagggacgctccattcccgtatggataaaaattttgctgtttgttgttgtggcagtttttttgtttttggtctatcaagctatggaaaccaaccaagtaaatcccttctctaattttcttcatgttgaccctagaaaatccaactgaatggtatctctttggcacgttcaacttggtctcctattttcaataactgttgaaaaacatttgtgtacacttgttgactccaagaactaaaaataatgtgatttcgcctcaataaatgtagtatttcattgaaaagcaaacaaaatatatataaatggacttcattaaaatgtttttgaactttggactagtaggagatcactttgtgccatatgaataatcttttttagctctggaactttttgtaggctttatttttttaatgtgggcatcttatttcatttttgaaaaaatgtatatgttttttgtgtatttgggaaacgaagggtgaaacatggtagtataatgtgaagctacacatttaaatacttagaattcttacagaaaagattttaagaattattctctgctgaataaaaactgcaaatatgtgaaacataatgaaattcagtaagaggaaaagtaacttggttgtactttttgtaactgcaacaaagtttgatggtgtttatgaggaaaagtacagcaataatctcttctgtaacctttattaatagtaatgttgttgtagccctatcatactcactttttaagacacagtatcatgaaagtcctatttcagtaagacccatttacatacagtagatttttagcagagatcttttagtgtaacatacatattttagagaattgttggctagctgtacatgttttgaaaagctgtttagctagctataaggctataattggaaatttgtattttttatttacagcaaaacatttattcagtcatccagtttgctaccaaaatatgttttagataagtgtgtgtatgtttgtttagaagttagaaattgtaaacactggtcttatgtttcatttggattcattattgcattgtcttgttaccagaaacaaattttgccgagcttttttgccctatatttcccagcataatttgattaaaaaaaaaaaaaaa

SEQ ID NO: 395 - DNA, 2107 bp, Homo sapiens
ggcacgaggaaagaaacaacaactggaaaagaagcattgcataagaccaggatgtctctgaaatggatgtcagtctttctgctgatgcagctcagttgttactttagctctgggagttgtggaaaggtgctggtgtggcccacagaatacagccattggataaatatgaagacaatcctggaagagcttgttcagaggggtcatgaggtgattgtgttgacatcttcggcttctattcttgtcaatgccagtaaatcatctgctattaaattagaagtttatcctacatctttaactaaaaatgatttggaagatttttttatgaaaatgttcgatagatggacatatagtatttcaaaaaatacattttggtcatatttttcacaactacaagaattgtgttgggaatattctgactataatataaagctctgtgaagatgcagttttgaacaagaaacttatgagaaaactacaagagtcaaaatttgatgtccttctggcagatgccgttaatccctgtggtgagctgctggctgaactacttaacataccctttctgtacagtctccgcttctctgttggctacacagttgagaagaatggtggaggatttctgttccctccttcctatgtacctgttgttatgtcagaattaagtgatcaaatgattttcatggagaggataaaaaatatgatatatatgctttattttgacttttggtttcaagcatatgatctgaagaagtgggaccagttttatagtgaagttctaggaagacccactacattatttgagacaatggggaaagctgaaatgtggctcattcgaacctattgggattttgaatttcctcgcccattcttaccaaatgttgattttgttggaggacttcactgtaaaccagccaaacccttgcctaaggaaatggaagagtttgtgcagagctctggagaaaatggtattgtggtgttttctctggggtcgatgatcagtaacatgtcagaagaaagtgccaacatgattgcatcagcccttgcccagatcccacaaaaggttctatggagatttgatggcaagaagccaaatactttaggttccaatactcgactgtataagtggttaccccagaatgaccttcttggtcatcccaaaaccaaagcttttataactcatggtggaaccaatggcatctatgaggcgatctaccatgggatccctatggtgggcattcccttgtttgcggatcaacatgataacattgctcacatgaaagccaagggagcagccctcagtgtggacatcaggaccatgtcaagtagagatttgctcaatgcattgaagtcagtcattaatgaccctatctataaagagaatatcatgaaattatcaagaattcatcatgatcaaccggtgaagcccctggatcgagcagtcttctggattgagtttgtcatgcgccataaaggagccaagcaccttcgggtcgcagcccacaacctcacctggatccagtaccactctttggatgtgatagcattcctgctggcctgcgtggcaactatgatatttatgatcacaaaatgttgcctgttttgtttccgaaagcttgccaaaacaggaaagaagaagaaaagggattagttatatcaaaagcctgaagtggaatgaccaaaagatgggactcctcctttattccagcatggagggttttaaatggaggatttcctttttcctgcgacaaaacgtcttttcacaacttaccctgttaagtcaaaatttattttccaggaatttaatatgtactttagttggaattattctatgtcaatgatttttaagctatgaaaaataataatataaaaccttatgggcttatattgaaatttattattctaatccaaaagttaccccacacaaaagttactgagcttccttatgtttcacacattgtatttgaacacaaaacattaacaactccactcatagtatcaacattgttttgcaaatactcagaatattttggcttcattttgagcagaatttttgtttttaattttgccaatgaaatcttcaataattaaaaaaaaaaaaaaaaaaaaaaaaa

SEQ ID NO: 396 - DNA, 2090 bp, Homo sapiens
ttcggcacgagtaagaccaggatgtctctgaaatggacgtcagtctttctgctgatacagctcagttgttactttagctctggaagctgtggaaaggtgctagtgtggcccacagaatacagccattggataaatatgaagacaatcctggaagagcttgttcagaggggtcatgaggtgactgtgttgacatcttcggcttctactcttgtcaatgccagtaaatcatctgctattaaattagaagtttatcctacatctttaactaaaaatgatttggaagattctcttctgaaaattctcgatagatggatatatggtgtttcaaaaaatacattttggtcatatttttcacaattacaagaattgtgttgggaatattatgactacagtaacaagctctgtaaagatgcagttttgaataagaaacttatgatgaaactacaagagtcaaagtttgatgtcattctggcagatgcccttaatccctgtggtgagctactggctgaactatttaacataccctttctgtacagtcttcgattctctgttggctacacatttgagaagaatggtggaggatttctgttccctccttcctatgtacctgttgttatgtcagaattaagtgatcaaatgattttcatggagaggataaaaaatatgatacatatgctttattttgacttttggtttcaaatttatgatctgaagaagtgggaccagttttatagtgaagttctaggaagacccactacattatttgagacaatggggaaagctgaaatgtggctcattcgaacctattgggattttgaatttcctcgcccattcttaccaaatgttgattttgttggaggacttcactgtaaaccagccaaacccctgcctaaggaaatggaagagtttgtgcagagctctggagaaaatggtattgtggtgttttctctggggtcgatgatcagtaacatgtcagaagaaagtgccaacatgattgcatcagcccttgcccagatcccacaaaaggttctatggagatttgatggcaagaagccaaatacattaggttccaatactcgactgtacaagtggttaccccagaatgaccttcttggtcatcccaaaaccaaagcttttataactcatggtggaaccaatggcatctatgaggcgatctaccatgggatccctatggtgggcattcccttgtttgcggatcaacatgataacattgctcacatgaaagccaagggagcagccctcagtgtggacatcaggaccatgtcaagtagagatttgctcaatgcattgaagtcagtcattaatgaccctgtctataaagagaatgtcatgaaattatcaagaattcatcatgaccaaccaatgaagcccctggatcgagcagtcttctggattgagtttgtcatgcgccacaaaggagccaagcaccttcgagtcgcagctcacaacctcacctggatccagtaccactctttggatgtgatagcattcctgctggcctgcgtggcaactgtgatatttatcatcacaaaattttgcctgttttgtttccgaaagcttgccaaaacaggaaagaagaagaaaagagattagttatatcaaaagcctgaagtggaatgactgaaagatgggactcctcctttatttcagcatggagggttttaaatggaggatttcctttttcctgtgacaaaacatcttttcacaacttaccttgttaagacaaaatttattttccagggatttaatacgtactttagttggaattattctatgtcaatgatttttaagctatgaaaaatacaatggggggaaggatagcatttggagatatacctaatgttaaatgacgagttactggatgcagcacgcaacatggcacatgtgtatacatatgtagctaacccttcgttgtgcacatgtaccctaaaacttaaagtataatttaaaaaaagcaaaaaaaaaaaataccaactcttttttttaaaccaggaaggaaaatgtgaacatggaaacaacttctagtattggatctgaaaataaagtgtcatccaagccataaaaaaaaa

SEQ ID NO: 397 - DNA, 2211 bp, Homo sapiens
ggcgctgcggagggagggggcggcccggcccggcccagctctgcccccggccggcccgaccccggccccggcccccggacaagcccttatctgatcccagctccgggtttaagagtcctggcccggcccgtcgcacagctctgctcctaactcctgcccgccccgtccgtccatctgtcccgctgccccgcggcccatccaagggccactccacctcggacccaagatgacgtcagttgccaaggtgtattacagtcagaccactcagacagaaagccggcccctaatgggcccagggatacgacggcggagagtcctgacaaaagatggtcgcagcaacgtgagaatggagcacattgccgacaagcgcttcccctacctcaaggacctgtggacaaccttcattgacatgcagtggcgctacaagcttctgctcttctctgcgacctttgcaggcacatggttcctctttggcgtggtgtggtatctggtagctgtggcacatggggacctgctggagctggaccccccggccaaccacaccccctgtgtggtacaggtgcacacactcactggagccttcctcttctcccttgaatcccaaaccaccattggctatggcttccgctacatcagtgaggaatgtccactggccattgtgcttcttattgcccagctggtgctcaccaccatcctggaaatcttcatcacaggtaccttccaggcgaagattgcccggcccaagaagcgggctgagaccattcgtttcagccagcatgcagttgtggcctcccacaatggcaagccctgcctcatgatccgagttgccaatatgcgcaaaagcctcctcattggctgccaggtgacaggaaaactgcttcagacccaccaaaccaaggaaggggagaacatccggctcaaccaggtcaatgtgactttccaagtagacacagcctctgacagccccttccttattctaccccttaccttctatcatgtggtagatgagaccagtcccttgaaagatctccctctttgcagtggtgagggtgactttgagctggtgctgatcctaagtgggacagtggagtccaccagtgccacctgtcaggtgcgcacttcctacctgccagaggagatcctttggggctacgagttcacacctgccatctcactgtcagccagtggtaaatacatagctgactttagcctttttgaccaagttgtgaaagtggcctctcctagtggcctccgtgacagcactgtacgctacggagaccctgaaaagctcaagttggaggagtcattaagggagcaagctgagaaggagggcagtgcccttagtgtgcgcatcagcaatgtctgatgacctgttcccactcccccattcctctggtctcttttcctctcttccaatgccctggtaaggaatactacccgggtttactggagatcccccgaagcacccatcctccactccctcttctttaacccagtggcctgttggtagcttaggccaactggagtccaggttcgcctcccactgtcccctttccacttccccagcttctgccccaatacacatacctcccttaagccaggatgggggaaagagtgggattaggctgaagtggcttagaaggcctcagccatgcttggatactcacattaggaggaccatgtggttggaaggatagactgccccctacctcccaccaccaccatgaagtttggtgacttgaggctggagctccctctgttacctttccatctgacggattcccaaaggcaagactctctctgatggtcactttgtggtctgtgctttcagaaatacaggaatctgatatcaacatatcctagggtttctaccaatctctgttgaaagaagccagggtttgccactgtgaagcttgatttctgctggtgacttctgaccataagctagaaccatggtcgccactgttttccctctgtagtttctcaagtgaacactctcaggatacccagttccctcatagcctctgttctcagagaattggagttggcccaagaaacataaacatataaccacccatatctatcctggattctgaactcttcaatttggagtgactaacacaagttgttatctaaacctttaaacctatcttccaggcagcccagagaagatctgtttccctgtgtcctgtgaatggaaggacccgagcc

SEQ ID NO: 398 - DNA, 2167 bp, Homo sapiens
agagggagggaacgatttaaggagcgaatactactggtaaactaatggaagaaatctgctgcaccactggatattgggagtgtgtggcatgcatcctcatcatcaggaaactctaaaaaagaaccgagtggtgctagccaaacagctgttgttgagcgaattgttagaacatcttctggagaaggacatcatcaccttggaaatgagggagctcatccaggccaaagtgggcagtttcagccagaatgtggaactcctcaacttgctgcctaagaggggtccccaagcttttgatgccttctgtgaagcactgagggagaccaagcaaggccacctggaggatatgttgctcaccaccctttctgggcttcagcatgtactcccaccgttgagctgtgactacgacttgagtctcccttttccggtgtgtgagtcctgtcccctttacaagaagctccgcctgtcgacagatactgtggaacactccctagacaataaagatggtcctgtctgccttcaggtgaagccttgcactcctgaattttatcaaacacacttccagctggcatataggttgcagtctcggcctcgtggcctagcactggtgttgagcaatgtgcacttcactggagagaaagaactggaatttcgctctggaggggatgtggaccacagtactctagtcaccctcttcaagcttttgggctatgacgtccatgttctatgtgaccagactgcacaggaaatgcaagagaaactgcagaattttgcacagttacctgcacaccgagtcacggactcctgcatcgtggcactcctctcgcatggtgtggagggcgccatctatggtgtggatgggaaactgctccagctccaagaggtttttcagctctttgacaacgccaactgcccaagcctacagaacaaaccaaaaatgttcttcatccaggcctgccgtggaggtgctattggatcccttgggcacctccttctgttcactgctgccaccgcctctcttgctctatgagactgatcgtggggttgaccaacaagatggaaagaaccacgcaggatcccctgggtgcgaggagagtgatgccggtaaagaaaagttgccgaagatgagactgcccacgcgctcagacatgatatgcggctatgcctgcctcaaagggactgccgccatgcggaacaccaaacgaggttcctggtacatcgaggctcttgctcaagtgttttctgagcgggcttgtgatatgcacgtggccgacatgctggttaaggtgaacgcacttatcaaggatcgggaaggttatgctcctggcacagaattccaccggtgcaaggagatgtctgaatactgcagcactctgtgccgccacctctacctgttcccaggacaccctcccacatgatgtcacctccccatcatccacgccaagtggaagccactggaccacaggaggtgtgatagagcctttgatcttcaggatgcacggtttctgttctgccccctcagggatgtgggaatctcccagacttgtttcctgtgcccatcatctctgcctttgagtgtgggactccaggccagctccttttctgtgaagccctttgcctgtagagccagccttggttggacctattgccaggaatgtttcagctgcagttgaagagcctgacaagtgaagttgtaaacacagtgtggttatggggagagggcatataaattccccatatttgtgttcagttccagcttttgtagatggcactttagtgattgcttttattacattagttaagatgtcttgagagaccatctcctatcttttatttcattcatatcctccgccctttttgtcctagagtgagagtttggaaggtgtccaaatttaatgtagacattatcttttggctctgaagaagcaaacatgactagagacgcaccttgctgcagtgtccagaagcggcctgtgcgttcccttcagtactgcagcgccacccagtggaaggacactcttggctcgtttgggctcaaggcaccgcagcctgtcagccaacattgccttgcatttgtaccttattgatctttgcccatggaagtctcaaagatctttcgttggttgtttctctgagctttgttactgaaatgagcctcgtggggagcatc

SEQ ID NO: 399 - DNA, 4512 bp, Homo sapiens
  misc_feature (13)..(13): n is a, c, g, or t
  misc_feature (56)..(58): n is a, c, g, or t
  misc_feature (60)..(62): n is a, c, g, or t
  misc_feature (65)..(66): n is a, c, g, or t
  misc_feature (68)..(80): n is a, c, g, or t
  misc_feature (84)..(85): n is a, c, g, or t
  misc_feature (87)..(96): n is a, c, g, or t
  misc_feature (846)..(846): n is a, c, g, or t
  misc_feature (1172)..(1173): n is a, c, g, or t
  misc_feature (1177)..(1178): n is a, c, g, or t
  misc_feature (2748)..(2748): n is a, c, g, or t
  misc_feature (2794)..(2794): n is a, c, g, or t
  misc_feature (2820)..(2821): n is a, c, g, or t
  misc_feature (2871)..(2871): n is a, c, g, or t
  misc_feature (2879)..(2879): n is a, c, g, or t
  misc_feature (2898)..(2898): n is a, c, g, or t
  misc_feature (2927)..(2927): n is a, c, g, or t
  misc_feature (2946)..(2946): n is a, c, g, or t
  misc_feature (2951)..(2951): n is a, c, g, or t
  misc_feature (2958)..(2958): n is a, c, g, or t
  misc_feature (2962)..(2962): n is a, c, g, or t
  misc_feature (2981)..(2981): n is a, c, g, or t
  misc_feature (2987)..(2987): n is a, c, g, or t
  misc_feature (2990)..(2990): n is a, c, g, or t
  misc_feature (2993)..(2993): n is a, c, g, or t
  misc_feature (3001)..(3001): n is a, c, g, or t
  misc_feature (3009)..(3010): n is a, c, g, or t
  misc_feature (3012)..(3012): n is a, c, g, or t
  misc_feature (3021)..(3021): n is a, c, g, or t
  misc_feature (3024)..(3024): n is a, c, g, or t
  misc_feature (3032)..(3032): n is a, c, g, or t
  misc_feature (3039)..(3039): n is a, c, g, or t
  misc_feature (3045)..(3045): n is a, c, g, or t
  misc_feature (3444)..(3444): n is a, c, g, or t
  misc_feature (3446)..(3458): n is a, c, g, or t
  misc_feature (3460)..(3461): n is a, c, g, or t
  misc_feature (3465)..(3465): n is a, c, g, or t
  misc_feature (3468)..(3468): n is a, c, g, or t
  misc_feature (3477)..(3477): n is a, c, g, or t
  misc_feature (3704)..(3704): n is a, c, g, or t
  misc_feature (3707)..(3708): n is a, c, g, or t
  misc_feature (3710)..(3712): n is a, c, g, or t
  misc_feature (3714)..(3714): n is a, c, g, or t
  misc_feature (3774)..(3774): n is a, c, g, or t
  misc_feature (3855)..(3855): n is a, c, g, or t
  misc_feature (3969)..(3969): n is a, c, g, or t
  misc_feature (4142)..(4142): n is a, c, g, or t
  misc_feature (4319)..(4319): n is a, c, g, or t
  misc_feature (4498)..(4502): n is a, c, g, or t
gtccagcttttgnaaagtgaagcaagcagacttgtttgggtcaaggttgcctaggnnngnnnagnncnnnnnnnnnnnnntttnncnnnnnnnnnncctcctccacagtggtgaggtcacagccccttggagccctccctcttcccacccctcccgctcccgggtctccttttggcctggggtaacccgaggtgcagagctgagaatgaggcgatttcggaggatggagaaatagccccgagtcccgtggaaaatgaggccggcggacttgctgcagctggtgctgctgctcgacctgcccagggacctgggcggaatggggtgttcgtctccaccctgcgagtgccatcaggaggaggacttcagagtcacctgcaaggatattcaacgcatccccagcttaccgcccagtacgcagactctgaagcttattgagactcacctgagaactattccaagtcatgcattttctaatctgcccaatatttccagaatctacgtatctatagatgtgactctgcagcagctggaatcacactccttctacaatttgagtaaagtgactcacatagaaattcggaataccaggaacttaacttacatagaccctgatgccctcaaagagctccccctcctaaagttccttggcattttcaaacactggacttaaaatgttccctgacctgaccaaagtttattccactgatatattctttatacttgaaattacagacaacccttacatgacgtcaatccctgtgaatgcttttcagggactatgcaatgaaaccttgacactgaagctgtacaacaatggctttacttcagtccaaggatatgctttcnatgggacaaagctggatgctgtttacctaaacaagaataaatacctgacagttattgacaaagatgcatttggaggagtatacagtggaccaagcttgctggacgtgtctcaaaccagtgtcactgcccttccatccaaaggcctggagcacctgaaggaactgatagcaagaaacacctggactcttaagaaacttccactttccttgagtttccttcacctcacacgggctgacctttcttacccaagccactgctgtgcttttaagaatcagaagaaaatcagaggaatccttgagtccttgatgtgtaatgagagcagtatnnagannttgcgccagagaaaatctgtgaatgccttgaatagccccctccaccaggaatatgaagagaatctgggtgacagcattgttgggtacaaggaaaagtccaagttccaggatactcataacaacgctcattattacgtcttctttgaagaacaagaggatgagatcattggttttggccaggagctcaaaaacccccaggaagagactctacaagcttttgacagccattatgactacaccatatgtggggacagtgaagacatggtgtgtacccccaagtccgatgagttcaacccgtgtgaagacataatgggctacaagttcctgagaattgtggtgtggttcgttagtctgctggctctcctgggcaatgtctttgtcctgcttattctcctcaccagccactacaaactgaacgtcccccgctttctcatgtgcaacctggcctttgcggatttctgcatggggatgtacctgctcctcatcgcctctgtagacctctacactcactctgagtactacaaccatgccatcgactggcagacaggccctgggtgcaacacggctggtttcttcactgtctttgcaagcgagttatcggtgtatacgctgacggtcatcaccctggagcgctggtatgccatcaccttcgccatgcgcctggaccggaagatccgcctcaggcacgcatgtgccatcatggttgggggctgggtttgctgcttccttctcgccctgcttcctttggtgggaataagtagctatgccaaagtcagtatctgcctgcccatggacaccgagacccctcttgctctggcatatattgtttttgttctgacgctcaacatagttgccttcgtcatcgtctgctgctgttatgtgaagatctacatcacagtccgaaatccgcagtacaacccaggggacaaagataccaaaattgccaagaggatggctgtgttgatcttcaccgacttcatatgcatggccccaatctcattctatgctctgtcagcaattctgaacaagcctctcatcactgttagcaactccaaaatcttgctggtactcttctatccacttaactcctgtgccaatccattcctctatgctattttcaccaaggccttccagagggatgtgttcatcctactcagcaagtttggcatctgtaaacgccaggctcaggcataccgggggcagagggttcctccaaagaacagcactgatattcaggttcaaaaggttacccacgacatgaggcagggtctccacaacatggaagatgtctatgaactgattgaaaactcccatctaaccccaaagaagcaaggccaaatctcagaagagtatatgcaaacggttttgtaagttaacactacactactcacaatggtaggggaacttacaaaataatagtttcttgaatatgcattccaatcccatgacacccccaacacatagctgccctcactcttgtgcaggcgatgtttcaatgtttcatggggcaagagtttatctctggagagtgattagtattaacctaatcattgcccccaagaaggaagtnaggctaccagcatatttgaatgccaggtgaaatcaaaataatctanactatctagaagactttcttgatgcnnagtccagagatgtcattgtgtaggatgttcagtaaatattaactgagctntgtcaatntagagcttctcagttttgnataacatttcatactaaagattcagcaantggaaaatgctattaattnggttngtgaccnacangataaaatcagtcccacgntggctncanttnaactagangttccctnntncaaagaganctngatttccntaaaacngaaaanccaaacacagctagctgtcatacaagaaacagctattatgagacatgaaggagggtaagaattagctttaagttttgttttgctttgttttgttttttaactcaacctattaatcatctcttcacaagaatccacctgatgtgaccaagctattatgtgttgcctggaaaaactggcaagatttcagcttatgtggcctagcaaactaagaattgctcttcttggccagcctcatagcataaaagatgtgaactctaggaagtctttctgagtagcaataagtgggaattatgggcagagcacactcaatcccctgttgattaataaaacaggctggacactaattaactatgggacttaaatctgtagaaatgaaggagtccaatagcttcttccaantnnnnnnnnnnnnnanntctnttnccctcaaanatatatttctaagataaagagaaagaagagcactaagtaagtagaatctgtttttcctattttgtagggctgctgactcctagtccttgaagcctagacacatgacccaggaaatttttcctttgtttcacttttgattatgatgtctgagccaaaaattcaattaagtaaacatactcgcctggatctgaatcattcatttaattactagatctacccagctgcgnttnncnnncnaaaaacagattcgtgtttatataaaagagtaaacgatggttgcaaattttggctatttanagttgctacttcactatgaagagtcacttcaaaacacttcgcttgtctttagggatgatttttgccatttccagtccacgntatgatactaaagctgtcaagagaggtttcttcttttctgaaactgccagctctttccagccctgttgatcactggacataaagcttcttttccccaataattcttctttactnaaaatagtcaggatctttatctacagatgtactctccaggttacctgtgatgatagccccctaatgtcctgctagaaaagtctccaagcagagatgacattacttctgaatgctcataaaccacaccatgaaataaaagctctttgttgttttaagattgtgaagtgtcgttnatgggtccccacagatggtccctgctggactcacctggaatctctccacagccatacccactcatcactatcattgagacctgcacatcttaatagaaatattataaacatcgaaaatcatgacttacctagaagttcgcttgtaactaatgaaattaaacaaatgtgttgcctttntgtcatgtgtttctctcctgtgacatttcaaaatatcacatcttgataaataatgtgtttcatcttgaatagctgaactaattgctttggaaacagagtcctagaaaagtgacttcaacagaattgttactaaaatttgcactcacaacatgaaataaattttcttcctatggaataannnnnaaaaaaaaaa

SEQ ID NO: 400 - DNA, 1573 bp, Homo sapiens
ggctgggagagatggcaggcggaagacaccggcgcgtcgtgggcaccctccacctgctgctgctggtggccgccctgccctgggcatccaggggggtcagtccgagtgcctcagcctggccagaggagaagaattaccaccagccagccattttgaattcatcggctcttcggcaaattgcagaaggcaccagtatctctgaaatgtggcaaaatgacttacagccattgctgatagagcgatacccgggatcccctggaagctatgctgctcgtcagcacatcatgcagcgaattcagaggcttcaggctgactgggtcttggaaatagacaccttcttgagtcagacaccctatgggtaccggtctttctcaaatatcatcagcaccctcaatcccactgctaaacgacatttggtcctcgcctgccactatgactccaagtatttttcccactggaacaacagagtgtttgtaggagccactgattcagccgtgccatgtgcaatgatgttggaacttgctcgtgccttagacaagaaactcctttccttaaagactgtttcagactccaagccagatttgtcactccagctgatcttctttgatggtgaagaggcttttcttcactggtctcctcaagattctctctatgggtctcgacacttagctgcaaagatggcatcgaccccgcacccacctggagcgagaggcaccagccaactgcatggcatggatttattggtcttattggatttgattggagctccaaacccaacgtttcccaatttttttccaaactcagccaggtggttcgaaagacttcaagcaattgaacatgaacttcatgaattgggtttgctcaaggatcactctttggaggggcggtatttccagaattacagttatggaggtgtgattcaggatgaccatattccatttttaagaagaggtgttccagttctgcatctgataccgtctcctttccctgaagtctggcacaccatggatgacaatgaagaaaatttggatgaatcaaccattgacaatctaaacaaaatcctacaagtctttgtgttggaatatcttcatttgtaatactctgatttagtttaggataattggttctagaattgaattcaaaagtcaaggcatcatttaaaataatctgatttcagacaaatgctgtgtggaaacatctatcctatagatcatcctattcttatgtgtctttggttatcagatcaattacagaataattgtgttgtgatattgtgtcctaaattgctcattaatttttatttacagattgaaaaagaggcaccgtgtaaagaaaatggcaaaataaatatctttccaaggatcatcatcacgatagctaaacagtacttaaatagcggttggaactaggtagcctttcgaattttatgattttttcatatgtggaaatctattacatgtaatacaaaacaaacatgtagtttgaaggcggtcagatttctttgagaaatctttgtagagttaattttatggaaattaaaatcagaattaaatgctaaaaaaaaaaaaaaaaa

SEQ ID NO: 401 - DNA, 2376 bp, Homo sapiens
  misc_feature (315)..(316): n is a, c, g, or t
  misc_feature (1880)..(1880): n is a, c, g, or t
  misc_feature (1884)..(1884): n is a, c, g, or t
  misc_feature (1887)..(1889): n is a, c, g, or t
  misc_feature (1891)..(1893): n is a, c, g, or t
  misc_feature (1895)..(1898): n is a, c, g, or t
  misc_feature (1903)..(1903): n is a, c, g, or t
  misc_feature (1905)..(1906): n is a, c, g, or t
  misc_feature (1918)..(1918): n is a, c, g, or t
  misc_feature (1996)..(1996): n is a, c, g, or t
  misc_feature (2372)..(2372): n is a, c, g, or t
accagaggtttcccagagaggaaggcgtggctccctcccgggccagtgagccctggcgccgccgcggccgcggtcccagcagcggagtagggcggcggctgcgccccgcaccatggggggcagcccagccccagccgcggtaaacgccgacctccgccgccgcccgcgccgcgtctgccccctcccgctgcggctctctggacgccatcccctcctcacctcgaagccaacatgaaggagacccggggctacggaggggatgcccccttctgcacccgcctcaaccactcctacacaggcatgtgggcgcccganngttccgccgaggcgcggggcaacctcacgcgccctccagggtctggcgaggattgcggatcggtgtccgtggccttcccgatcaccatgctgctcactggtttcgtgggcaacgcactggccatgctgctcgtgtcgcgcagctaccggcgccgggagagcaagcgcaagaagtccttcctgctgtgcatcggctggctggcgctcaccgacctggtcgggcagcttctcaccaccccggtcgtcatcgtcgtgtacctgtccaagcagcgttgggagcacatcgacccgtcggggcggctctgcacctttttcgggctgaccatgactgttttcgggctctcctcgttgttcatcgccagcgccatggccgtcgagcgggcgctggccatcagggcgccgcactggtatgcgagccacatgaagacgcgtgccacccgcgctgtgctgctcggcgtgtggctggccgtgctcgccttcgccctgctgccggtgctgggcgtgggccagtacaccgtccagtggcccgggacgtggtgcttcatcagcaccgggcgagggggcaacgggactagctcttcgcataactggggcaaccttttcttcgcctctgcctttgccttcctggggctcttggcgctgacagtcaccttttcctgcaacctggccaccattaaggccctggtgtcccgctgccgggccaaggccacggcatctcagtccagtgcccagtggggccgcatcacgaccgagacggccattcagcttatggggatcatgtgcgtgctgtcggtctgctggtctccgctcctgataatgatgttgaaaatgatcttcaatcagacatcagttgagcactgcaagacacacacggagaagcagaaagaatgcaacttcttcttaatagctgttcgcctggcttcactgaaccagatcttggatccttgggtttacctgctgttaagaaagatccttcttcgaaagttttgccagatcaggtaccacacaaacaactatgcatccagctccacctccttaccctgccagtgttcctcaaccttgatgtggagcgaccatttggaaagataatgaaagaacggagttggacattttattgcaattcctgcttccctgaatttgcatatttcttcccacctgagaaggataattatatattttaatttggattatttcttcatttttatctttttattttaatgattgttttgtcagtaatacccatggagatcaactttattattataatccatgcctctgaatattagattggtttcttggatgggattttgaatatgcatttaagaagttgggaagaatttcacagatgatgattggaggaaaagtgatgaaaagaaagacctgtgttccaggagttttctccaacttcaaacctttacgtgaatcttaaccaaagtggacatctttacatttcatgatagcttgcttttgcaatatgagtttgaaaaatcagtataagcttatgatggtgaaaagtcaacatattgagagtgataattcaattaataggatatgaacttaacganatanaannnannnannnnacgananntaaaagcaaatnagggcaggagggaatcgtgacaaaaaatatttgtgcccaattatgattaatgttttagagatgttgtgtccctgtggncttagcatggaactaaaagttcctaagtctcaattctagttatgtgtcatttagtaactcaggaatctgcttaattgttatttctaagcttttgatgacaaaggagtgatgcagctaagggcatccttggagtgtcataaaaaacaaatttgaggttgaatgattagctgcgcagttagagtgataaaaaaatccaggtaggccttctgattcaccatgaccaagtcaggatttcttaatatttcttttctggcagcatatacaaaggcaaaattaataaataacagttgttgaataacaaactttattacgtttttataaaataaaagaatctattttgtctgtattaaaataaaaaactttgtggacttctaanagat

SEQ ID NO: 402 - DNA, 2389 bp, Homo sapiens
gaattcggacggaggaggcagaatggccagtcgaggggcgcttaggcgtggcctttccccagggctgcctcgactcctgcacctgtcccgagggctggcctgagacgggactcccggttctcccgctgcgaagcaggccccccggggccggggcagcggcgccggcatgtcgtctggcaccatgaagttcaatggctatttgagggtccgcatcggtgaggcagtggggctgcagcccacccgctggtccctgcgccactcgctcttcaagaagggccaccagctgctggacccctatctgacggtgagcgtggaccaggtgcgcgtgggccagaccagcaccaagcagaagaccaacaaacccacgtacaacgaggagttttgcgctaacgtcaccgacggcggccacctcgagttggccgtcttccacgagacccccctgggctacgacttcgtggccaactgcaccctgcagttccaggagctcgtcggcacgaccggcgcctcggacaccttcgagggttgggtggatctcgagccagaggggaaagtatttgtggtaataacccttaccgggagtttcactgaagctactctccagagagaccggatcttcaaacattttaccaggaagcgccaaagggctatgcgaaggcgagtccaccagatcaatggacacaagttcatggccacgtatctgaggcagcccacctactgctctcactgcagggagtttatctggggagtgtttgggaaacagggttatcagtgccaagtgtgcacctgtgtcgtccataaacgctgccatcatctaattgttacagcctgtacttgccaaaacaatattaacaaagtggattcaaagattgcagaacagaggttcgggatcaacatcccacacaagttcagcatccacaactacaaagtgccaacattctgcgatcactgtggctcactgctctggggaataatgcgacaaggacttcagtgtaaaatatgtaaaatgaatgtgcatattcgatgtcaagcgaacgtggcccctaactgtggggtaaatgcggtggaacttgccaagaccctggcagggatgggtctccaacccggaaatatttctccaacctcgaaactcgtttccagatcgaccctaagacgacagggaaaggagagcagcaaagaaggaaatgggattggggttaattcttccaaccgacttggtatcgacaactttgagttcatccgagtgttggggaaggggagttttgggaaggtgatgcttgcaagagtaaaagaaacaggagacctctatgctgtgaaggtgctgaagaaggacgtgattctgctggatgatgatgtggaatgcaccatgaccgagaaaaggatcctgtctctggcccgcaatcaccccttcctcactcagttgttctgctgctttcagacccccgatcgtctgttttttgtgatggagtttgtgaatgggggtgacttgatgttccacattcagaagtctcgtcgttttgatgaagcacgagctcgcttctatgctgcagaaatcatttcggctctcatgttcctccatgataaaggaatcatctatagagatctgaaactggacaatgtcctgttggaccacgagggtcactgtaaactggcagacttcggaatgtgcaaggaggggatttgcaatggtgtcaccacggccacattctgtggcacgccagactatatcgctccagagatcctccaggaaatgctgtacgggcctgcagtagactggtgggcaatgggcgtgttgctctatgagatgctctgtggtcacgcgccttttgaggcagagaatgaagatgacctctttgaggccatactgaatgatgaggtggtctaccctacctggctccatgaagatgccacagggatcctaaaatctttcatgaccaagaaccccaccatgcgcttgggcagcctgactcagggaggcgagcacgccatcttgagacatcctttttttaaggaaatcgactgggcccagctgaaccatcgccaaatagaaccgcctttcagacccagaatcaaatcccgagaagatgtcagtaattttgaccctgacttcataaaggaagagccagttttaactccaattgatgagggacatcttccaatgattaaccaggatgagtttagaaacttttcctatgtgtctccagaattgcaaccatagccttatggggagtgagagagagggcacgagaacccaaaggaatagagattctccaggaatttcctctatcggaccttcccagcatcagccttagaacaagaaccttaccttcaaggagcaagtgaagaactctgtcgaaggatggaactttcagatatcaactatttagagtcc

SEQ ID NO: 403 - DNA, 3152 bp, Homo sapiens
cctgcggcagccggagctcggggagcggagcgtggtggggaggggagcgggacaggcgacacaggagacagcggcgccgcggcctctccccaccaggcggccccggatcctactggacgccctgagggcacaccgaccgcgcctctagagtcaccccacgccgacccctcccctcttctctagacttatttccatccttcccgcttttaccctccccacccgtccctgggctccaggccgccgccccctcctcactcctggaccggcccttctcggtgcccctcttccctagggagatgcgatgagccggtgcccccgcgtcctcatcgtcgccccgggcacggtgcccgtccagtgcccgtggtggggagggagcactccgcggtccctccgtgacgcccctcgcttggccccccccacagctggcgtccctcggccatgccccaggggacccagccagggggtgggctctagagcgagtggggtggagaggagaaaggacggggccttgggggcctctgagatgctcccaagtgccagggagggccgagcgaggcgcaggcaaccgggcagcaggcatgatgccctcgcctagtgactccagccgctcgctgaccagccggcccagcaccaggggccttacccacctccgcctccaccgaccctggctgcaggccctgcttacgctggggctggtccaagtgctcctgggcatcctggtggtcaccttcagcatggtggcctcttccgtcaccaccaccgagagcatcaagaggtcctgcccgtcttgggctgggttctcgctggcgttctccggggtggttggcattgtgtcctggaagcggccattcactctagtgatctccttcttctccttgctttcggtgctctgtgtcatgcttagcatggctggctctgttctctcctgtaagaatgctcaactggcccgagacttccaacagtgctctctggaaggaaaggtctgtgtgtgctgtccctctgttcccctcctccggccctgtccagagtcggggcaggaactgaaagttgcccctaactccacctgtgatgaagcccgaggggccctcaagaacctgctcttcagcgtctgtgggctcaccatttgtgccgctataatctgtacactctctgctattgtctgctgcatccaaatcttctccctggacctcgtgcatacgcagctggcccctgagcggtcagtctcaggcccactgggacctctgggctgcacgtccccgcccccagcccctctcctacacaccatgctggacctggaggaatttgtcccgcctgtgcccccaccgccctactatcccccagagtatacctgcagctcagaaacagatgcacagagcatcacgtacaatggctccatggacagcccagtgcccttgtaccctaccgattgccccccttcttatgaggcagtcatgggactacgaggagacagccaggccactctctttgaccctcagcttcacgatggctcgtgcatctgtgaacgagtggcctccattgtagacgtgtccatggacagcgggtctctggtgctgtcagccattggtgacctccctgggggctctagcccgtcggaggactcgtgcctgctggagctgcagggctccgtgcgctccgtggactacgttctctttcgctccatccagcgcagccgtgccggctactgcctcagcctggactgtggcctgcggggccccttcgaggaaagccccctgccacggcgccccccacgggctgcccgctcctattcctgctctgcccctgaagctccacccccactgggtgcccccacagctgcccgcagctgccaccggttggagggctggccgccctgggtgggaccctgcttccccgagctgaggcggcgggtcccccggggagggggccgcccagccgcagccccgcccacccgagccccgactcgtcgcttcagcgatagctcaggttccctcaccccaccggggcaccggcctcctcatccggcatccccaccaccgctgctgctgccacggtcccacagcgacccaggcatcacgacctccagtgacactgctgacttcagggacctttataccaaagtgcttgaggaagaagctgcttctgtttcctctgcagatacagggctctgctctgaagcctgcctcttccgcctagcccgctgcccttcccccaagttgctacgtgcccggtcagccgagaaacggcgccctgtgcccaccttccaaaaagttcccctgccctcgggccctgcacctgcccactccctgggggacctaaagggcagctggccaggtcggggcctggtcactcgtttcctccagatatccaggaaagccccagaccccagtgggactggagctcatggacataagcaggtgccccggagcctgtggggccggcctggccgagagagcctccaccttcgcagctgcggagatctgagctctagctcttccctgcggcgtctcctgtctggccgcaggctggagcgtggtacccgcccccacagcctcagcctcaacgggggcagccgggagactgggctctgacctaggcttcttgtcacactgaacacatccagccacaggcaccagctggttgggaccagcagcccccagcatcctcttgcactggctggcacaaaaagaaacctgctgtataccccccaaagtgtccctttccctcctacctctggggtctcttgctgcttgcctctgctgctctggtctgggagagcttctgtcctgtgctgcatgggtatttagactgtgggggagatgccccttcttatagcactggaggaggaaaacaaattcttgtccccctcagaatgagagtggctctttctgatttgcaagggcactatggtcagggcaaaggcatggcccaggtgtttaagtacagggtgacgtgtgcctatgcaatggggtggtaaggcaggcacgaagagtccaaaaaatctaggtggcctctcagctctgccacctctagctgcatgaccttgggcaagctatgtaaccccaattgcctgctccattaaagactgtgaaggtagaatgtttgtaaagctcttaacagtatgtaagccttcaataaatttcagttttcccctt

SEQ ID NO: 404 - DNA, 6200 bp, Homo sapiens
ggtttttaggcctggccgccatggcgtctccttctagaaactcccagagccgacgccggtgcaaggagccgctccgatacagctacaaccccgaccagttccacaacatggacctcaggggcggcccccacgatggcgtcaccattccccgctccaccagcgacactgacctggtcacctcggacagccgctccacgctcatggtcagcagctcctactattccatcgggcactctcaggacctggtcatccactgggacataaaggaggaagtggacgctggggactggattggcatgtacctcattgatgaggtcttgtccgaaaactttctggactataaaaaccgtggagtcaatggttctcatcggggccagatcatctggaagatcgatgccagctcgtactttgtggaacctgaaactaagatctgcttcaaatactaccatggagtgagtggggccctgcgagcaaccacccccagtgtcacggtcaaaaactcggcagctcctatttttaaaagcattggtgctgatgagaccgtccaaggacaaggaagtcggaggctgatcagcttctctctctcagatttccaagccatggggttgaagaaagggatgtttttcaacccagacccttatctgaagatttccattcagcctgggaaacacagcatcttccccgccctccctcaccatggacaggagaggagatccaagatcataggcaacaccgtgaaccccatctggcaggccgagcaattcagttttgtgtccttgcccactgacgtgctggaaattgaggtgaaggacaagtttgccaagagccgccccatcatcaagcgcttcttgggaaagctgtcgatgcccgttcaaagactcctggagagacacgccataggggatagggtggtcagctacacacttggccgcaggcttccaacagatcatgtgagtggacagctgcaattccgatttgagatcacttcctccatccacccagatgatgaggagatttccctgagtaccgagcctgagtcagcccaaattcaggacagccccatgaacaacctgatggaaagcggcagtggggaacctcggtctgaggcaccagagtcctctgagagctggaagccagagcagctgggtgagggcagtgtccccgatcgtccagggaaccaaagcatagagctttccagaccagctgaggaagcagcagtcatcacggaggcaggagaccagggcatggtctctgtgggacctgaaggggctggggagctcctggcccaggtgcaaaaggacatccagcctgcccccagtgcagaagagctggccgagcagctggacctgggtgaggaggcatcagcactgctgctggaagacggtgaagccccagccagcaccaaggaggagcccttggaggaggaagcaacgacccagagccgggctggaagggaagaagaggagaaggagcaggaggaggagggagatgtgtccaccctggagcagggagagggcaggctgcagctgcgggcctcggtgaagagaaaaagcaggccctgctccttgcctgtgtccgagctggagacggtgatcgcgtcagcctgcggggaccccgagaccccgcggacacactacatccgcatccacaccctgctgcacagcatgccctccgcccagggcggcagcgcggcagaggaggaggacggcgcggaggaggagtccaccctcaaggactcctcggagaaggatgggctcagcgaggtggacacggtggccgctgacccgtctgccctggaagaggacagagaagagcccgagggggctactccaggcacggcgcaccctggccactccgggggccacttccccagcctggccaatggcgcggcccaggatggcgacacgcaccccagcaccgggagcgagagcgactccagccccaggcaaggcggggaccacagttgcgagggctgtgacgcgtcctgctgcagcccctcgtgctacagctcctcgtgctacagcacgtcctgctacagcagctcgtgctacagcgcctcgtgctacagcccctcctgctacaacggcaacaggttcgccagccacacgcgcttctcctccgtggacagcgccaagatctccgagagcacggtcttctcctcgcaagacgacgaggaggaggagaacagcgcgttcgagtcggtacccgactccatgcagagccctgagctggacccggagtccacgaacggcgctgggccgtggcaagacgagctggccgcccctagcgggcacgtggaaagaagcccggaaggtctggaatcccccgtggcaggtccaagcaatcggagagaaggtgaatgtcctatactccataattcccagccagtaagccagcttccttccctgaggcctgaacatcatcactacccaacaatcgatgagcctcttccaccaaactgggaagctcgaattgacagccacgggcgggtcttttatgtggaccacgtgaaccgcacaaccacctggcagcgtccgacggcagcagccaccccggatggcatgcggagatcggggtccatccagcagatggagcaactcaacaggcggtatcaaaacattcagcgaaccattgcaacagagaggtccgaagaagattctggcagccaaagctgcgagcaagccccagcaggaggaggcggaggtggagggagtgactcagaagccgaatcttcccagtccagcttagatctaaggagagaggggtcactttctccagtgaactcacaaaaaatcaccttgctgctgcagtccccagcggtcaagttcatcaccaaccccgagttcttcactgtgctacatgccaattatagtgcctaccgagtcttcaccagtagcacctgcttaaagcacatgattctgaaagtccgacgggatgctcgcaattttgaacgctaccagcacaaccgggacttggtgaatttcatcaacatgttcgcagacactcggctggaactgccccggggctgggagatcaaaacggaccagcagggaaagtcttttttcgtggaccacaacagtcgagctaccactttcattgacccccgaatccctcttcagaacggtcgtcttcccaatcatctaactcaccgacagcacctccagaggctccgaagttacagcgctggagaggcctcagaagtttctagaaacagaggagcctctttactggccaggccaggacacagcttagtagctgctattcgaagccaacatcaacatgagtcattgccactggcatataatgacaagattgtggcatttcttcgccagccaaacatttttgaaatgctgcaagagcgtcagccaagcttagcaagaaaccacacactcagggagaaaatccattacattcggactgagggtaatcacgggcttgagaagttgtcctgtgatgcggatctggtcattttgctgagtctctttgaagaagagattatgtcctacgtccccctgcaggctgccttccaccctgggtatagcttctctccccgctgttcaccctgttcttcacctcagaactccccaggtttacagagagccagtgcaagagccccttccccctaccgaagagactttgaggccaagctccgcaatttctacagaaaactggaagccaaaggatttggtcagggtccggggaaaattaagctcattattcgccgggatcatttgttggagggaaccttcaatcaggtgatggcctattcgcggaaagagctccagcgaaacaagctctacgtcacctttgttggagaggagggcctggactacagtggcccctcgcgggagttcttcttccttctgtctcaggagctcttcaacccttactatggactctttgagtactcggcaaatgatacttacacggtgcagatcagccccatgtccgcatttgtagaaaaccatcttgagtggttcaggtttagcggtcgcatcctgggtctggctctgatccatcagtaccttcttgacgctttcttcacgaggcccttctacaaggcactcctgagactgccctgtgatttgagtgacctggaatatttggatgaggaattccaccagagtttgcagtggatgaaggacaacaacatcacagacatcttagacctcactttcactgttaatgaagaggtttttggacaggtcacggaaagggagttgaagtctggaggagccaacacacaggtgacggagaaaaacaagaaggagtacatcgagcgcatggtgaagtggcgggtggagcgcggcgtggtacagcagaccgaggcgctggtgcgcggcttctacgaggttgtagactcgaggctggtgtccgtgtttgatgccagggagctggagctggtgatagctggcaccgcggaaatcgacctaaatgactggcggaataacactgagtaccggggaggttaccacgatgggcatcttgtgatccgctggttctgggctgcggtggagcgcttcaataatgagcagaggctgagattactgcagtttgtcacgggaacatccagcgtgccctacgaaggcttcgcagccctccgtgggagcaatgggcttcggcgcttctgcatagagaaatgggggaaaattacttctctccccagggcacacacatgcttcaaccgactggatcttccaccgtatccctcgtactccatgttgtatgaaaagctgttaacagcagtagaggaaaccagcacctttggacttgagtgaggacatggaacctcgcctgacattttcctggccagtgacatcacccttcctgggatgatccccttttccctttcccttaatcaactctcctttgattttggtattccatgatttttattttcaaaccaaatcaggattgacaaaagctgtgcatgaagaactgccttcttctaagatctaaccttcaggcttctctcctctgttttcaatgaactgctagcctgtatgcaatattaaaaaacagctgtctcaaggtctgtgtatatctccacatacctccattactaacaatgaaatatgaatgcaagttaagctacacttgaccaaatggtaataaatgtttacttccatttctatcattgaagggaaaatgtgagcattaagcactccaggctttcatatgcccatgtcttctgagcagagccaccattttttataatttctaataaccaactccagaactaggagctgatcaactctttgttttcctctccatctacttttccctgtgcataatatccatccaaaggacaacagtggcaaagctgaaatttttatacattcaactcatgattcacatgtggcatcagtcccatcagccggaactagcctagacatacggtgcaaatatgacacttctaacgattaacaacagcaagaaaacacctgctgctgatgcaatgcaatgcatcccaatggttgtggggattgtgggctcaactcaagagaagtttaggagggggagcatccctagtgaatactcacaccacaagaaggacaaacttgtgcacatgtccaagaaagaaagcttcttgattgaggtagcatgaaggatgaggcttcagcccccattgtcttatgtagaatgtggcaatgccaactggagaaagggaagaaggacatattaccttggtttgaatccctgagttctgtactgttctgttttgtttagtctagccacagttcttcacaaaggaaaaaaaaatgtgtagatgataccatgacttttgttaaagccatgacttttgtttgcttggcagacaaaccctttttttaaaactttgatatttttttttcacattttttttccttttcctttcttaatcatggagttcaagttcctttgcattcgattgtccatcgggaccacactaggaagctgcagagagtgatggtgcttgttagggatcaagggcaacatagtacttctccttcacccatagtaatcctcctggggcagaaacataacaccccaaaggcacgttgatttgtatcaaaataaatatccagtttcttttagcattcagtgaaaacatatctcagaaaacttcatgttgtcagaaaaacagctgcaggctccaaagacagcctaacctctcaactacatttgaaataaacccaaccataatggtaaaaaaaaaa

SEQ ID NO: 405 - DNA, 6314 bp, Homo sapiens
gtcggcgaggagggtccggccggagttgaaggattgaactttccggctcagtcgcggcggctgcctggtcctcagcagtgcagccccggcgcggagcagggagcctcggcccgcgcccggcgccctcgccctcgccctcgacccgcagccatggtgcccggggtgcccggcgcggtcctgaccctctgcctctggctggcggcctccagcggctgcctggcggccggccccggcgcggctgctgcgcggcggctggacgagtcgctgtctgccgggagcgtccagcgcgctccgtgcgcctccaggtgcctgagcctgcagatcactcgcatctccgccttcttccagcacttccagaacaatggttccctggtttggtgccagaatcacaagcaatgttctaagtgcctggagccctgcaaggaatcaggggacctgaggaaacaccagtgccaaagcttttgtgagcctctcttccccaagaagagctacgaatgcttgaccagctgtgagttcctcaaatacatcctgttggtgaagcagggggactgtccggctcctgagaaagccagtggatttgcggccgcctgtgttgaaagctgcgaagttgacaatgagtgctctggggtgaagaaatgttgttcgaatgggtgtggacacacctgtcaagtacccaagactctgtacaaaggtgtccccctgaagcccagaaaagagttacgatttacagaactgcagtctggacagctggaggttaagtggtcctcgaaattcaatatttctattgagcctgtgatctatgtggtacaaagaagatggaattatggaatccatcctagcgaagatgacgccactcactggcagacagtggcccagaccacagacgagcgagttcaactgactgacataagacccagccgatggtaccagtttcgagtggctgctgtgaatgtgcatggaactcgaggcttcactgcccccagcaaacacttccgttcttccaaagatccatctgccccaccagcaccggctaacctccggctggccaactccaccgtcaacagtgatgggagtgtgaccgtcactatagtttgggatctccccgaggagccggacatccctgtgcatcattacaaggtcttttggagctggatggtcagcagtaagtctcttgtcccaacaaagaagaagcggagaaagactacggatgggtttcaaaattctgtgatcctggagaaactccagccagactgtgactatgttgtggaattgcaagccataacgtactggggacagacacggctgaagagtgcaaaggtgtcccttcacttcacatcgacacatgcaaccaacaacaaagaacagcttgtgaaaactagaaaaggtggaattcaaacacaactcccttttcaaagacgacgacccactcgcccgctggaagtcggagctcccttctatcaggatggccaactgcaagttaaagtctactggaagaagacagaagatcccactgtcaaccgatatcatgtgcggtggtttcctgaagcgtgtgcccacaacagaacaaccggatcagaggcatcatctggcatgacccacgaaaattacataattcttcaagatctgtcattttcctgcaagtataaggtgactgtccaaccaatacggccaaaaagtcactccaaggcagaagctgttttcttcactactccaccatgctctgctcttaaggggaagagccacaagcctattggctgcctgggcgaagcaggtcatgttctttctaaggtgctagctaagcctgagaacctttctgcttcattcatcgtccaggatgtgaacatcaccggtcacttttcttggaagatggccaaggccaatctctatcagcccatgactgggtttcaagtgacttgggctgaggtcactacggaaagcagacagaacagcctacccaacagcattatttcacagtcccagattctgccttccgatcattatgtcctaacagtgcccaatctgagaccatctactctttaccgactggaagtgcaagtgctgaccccaggaggggaggggccggccaccatcaagacgttccggacgccggagctcccaccctcttcagcacacagatctcatcttaagcatcgtcatccacatcattacaagccttctccagaaagatactaaactgttcaaaaagattttgtgaaattgcacagatgtgtaagcttgttgaacttcggccacgagacatgcacacttccagaggcagtgggaactgctcagaggcccggactctcctatgtgactttagtgcaggaagaacttctgtcaatcatggacgcatctggagacaagtgagaaacagtagattggtgaagacagacaccagttccctacaagcatggagaaaatgaagaataggcctgtttaatgctaaattttgttttcatgtatggtgtcgctcatttctattgaattacaacagaactcagttttccctgaatttggagcaccaaactccgccccaaaaaggagagtaacaaatacacaattcacacataacactaagcgtaaatctaatcaataaaatatatttttgactaaattattgattcgatatgaaaaatcaactaagattacacagctttgtttttttgaatctttcctaagatcatttttatcctaggtgatttttaaatgaaaatgtgtaatctaaaatataccagcgaatttaaatctaaaaatgctcctactttaagtaccttgtgctgctctttatgcaaaggtaaatcaaagttccctctataaattatgatttacaaaagacacccaagccagaggaactcaatgaaataagctgctaatcagattttaccttggagaaatgaaaattatttcttggggatgccttttaatatttgatcctattatgtgagagattttcctgatatgttatcttatttatattttcccttattttcctcaatgcagataatagcttttggtgcacttttgtttcaccatctgaaaattcacaaaacttcttgcttcaaatgaaaaaatcccaactattgagcatgtttaaatctttgcagagatttgccttttcttaatcaaagaaaggtctttgtgtgctagaatattattggtaatgttttaaaaattcctttgattgatagagaaggacagttatttgcatttaattcacccatatgctttcaaatctagtatatcttactttttggaaatgttttatgctacaaattagtgccttgtagcatgaacttaagtcaaaacgtgttatcaatatagagtgttgcagtgtatattgtaacaacctaaaacgcagagaagtttaatttaatactgttttttttcttgaaggaatactcacatacatggtttgaaatgtgcatagatatgcatgtctatataattataaatgcatgtgtatatatatgcaaatatatgtacatatacatgtatatacacacagacacatgcatatacatgaatataccttgagcatgaatccctggagaaatcgttttcgtaggctcaccaatggtgagtaaagatacagctcttttaaaggtcataaggataatatattttccccatcaatgctgattctgagaaaagagcaatttatcaaaattaaacactgtaaaagaaaggtgtccatatgtctttacctacctaagtaaaacaggaagaaaatcagtaacattatccttaggttttgacaatggtacttgcttcttgttgttttattgtttcctgaattcatgcagatgcctggccattcctgggaagagtggataactcagaagtcactgtactccacagagcctcactgcagtgtctaaaggtagatgcaaattaaaatgcagggaaaataacttttctgatgttgatgcatgtctttgggaaacacatttataaacatggatacctgataatagatattgaaacccatttcctgtgtgttaaaatatttaaaaagtggatattccaggaatgttttgcagctttgtacaagtaacataaattggacacctcagaatgaaagttcatgttggttctgaatggttcactgcagctcctgtcacaagctgggatggatttatcacattgagttatgaaattacctggttctaagaatttttgagtggcaaaaatagaaaacaatcttcatttgaaaacatccctaagcttgaataaatggataccatagatagcttctcttttttattctggtgtcattaccagcatctgaatttcaagttcttaaaatttcaaaaattaaaatttttcattattagctatccatttatcttttacatgaacttgtcatgaacaaattcaaatgtttatgccagcaaatttttgtactgttgcatagttaaaaatgctgggagtctctgcatagatacaaaatattattaaattattacataaatttaattttataaaatttaatcatgcttcttttgtctggtaatagacattggacagatatttttagttcagatggtgattctgaagcttacatctcccttaaaaaaatctaaagcagctcttatgggcttctaattttaatataaataaataatttaaattttattggtgttattggaagaaaaatgctattaatgggctaataaaaaacatgtgtttctcttatggattttaataagctccagtattattcaaatgatcaaaaatatagttataattttttgaattttaaaaatgtgattgctctaataaagaataaaatctatgctttttaacaaacatagttttggtgcctaattctgtaatatgttttattgaaattagattcatttctctaatgtgagaaaaatatatccagtaatagtattgactgtttaaaaaattgagctcatcaaaaatattgtcatcaaatacaggtggttaatctgacatacattgcagttacatgcattatttttatttacaacatttgctccttaatgatgaatttatctgtgttaccctgtttttctacctggaactccatagaatgatgtttgcaaaccaacatgtgctcttttcagtcattcactgttttaatatgacatggtagagaagataaggtttatggcaggtaattttttgtaatgtgtattaaacgaagttcaaagattagaaatacatctgtgtcctgaaaaccttagatacatagccgactgtatacagaggttcatctcaacctcaacactattgacttttggggctggatagttctctgttgtgggggtttgtcttgtgcactgtaggtttttagtagcatccacactttctcctcaccagatgccagttgcaccctcccccaagttgagacaaccaaaaatgtctccagatattgccagctaccccttgagggatggtacctctggttgagaaccattgctagagaatgatctttactgaatttgccctttataagaaacccagtgaatttctagagcaagtcccaaaaactaagggacagctaagaagttattatggttgacttcaaaggcctaaactgtgttttttatgtccactaaacaacttgattaaaagacggaattttgactcgtgtctgtatcatacaagtacaaatactaattttgccctatgtatccgtaaatgtcatttgtgattttgacttatttatttaatgccctttcttatgccgtgggttttcaagtttactcatttctatggttgcaaataactctaaaacttattatataaactttcatattataggcagaacacaatggctaaatatctgttgcatgtactttaaagtttattataaaatataaacagatatataaagatgttgactcttacctgtgattttgcatggtcagactcggtgtcaggtacggagaggattctcatgactgtcttacctctactgaatattctagtgagttatatgatttacggagtgattaacagaggtctatataaagttacttttcccctttacttaattatattgtagtgtgcagataacaaaactgctaccttctcatccaagtggtctgtagaattcatgtcccttacagtggtcatttaaagtcaatatttatttatgtatgtaataaaaaaagttggatttttgtgtatgtctgtcacattatttagagagaagtaatcttgtaaaaatgttttgtaaaaaacaaaaaagtattgtaaatagtcttgatattctgtgactcattattttcatgttagagtttgtacatactggttcaataataaagtatccttaaaccaga

SEQ ID NO: 406 - DNA, 1597 bp, Homo sapiens
  misc_feature (19)..(19): n is a, c, g, or t
  misc_feature (71)..(71): n is a, c, g, or t
  misc_feature (259)..(259): n is a, c, g, or t
  misc_feature (265)..(265): n is a, c, g, or t
  misc_feature (1230)..(1230): n is a, c, g, or t
  misc_feature (1287)..(1287): n is a, c, g, or t
  misc_feature (1294)..(1294): n is a, c, g, or t
  misc_feature (1314)..(1314): n is a, c, g, or t
  misc_feature (1326)..(1326): n is a, c, g, or t
  misc_feature (1343)..(1343): n is a, c, g, or t
  misc_feature (1347)..(1347): n is a, c, g, or t
  misc_feature (1562)..(1562): n is a, c, g, or t
cacccacacccattcactnatgcctcgccagcttccatgccacctgtcagcactgagtaattaggagaccncatggcccacaaagctgcttgtgtggcccgttatgggaaaaaaaaaaaaaaggctaactcctgaattgcacaaatcttgatggatagaggggagaaaagcaaggcaggtccacacccccattaagaaaaggacaccaactgtagcttgaaggatctgaggggtctactccagatatcgcagagtgggnagtggnagaaaaaacagtagatgtgctgaaatgcttccggggcccttgaaaaagagatgggaagatgacaactttggtctcagcagagaacagcaaggaattggccaacaagagaacatagatgtttcggtcaagctagtcctttgggtgagataagttggaaaaaaaggtgtttctgccacttgaagtgtttggtacaggtttcacatctttgtgagatgacatacatgagttcttgagagacattcagaaagtgtaaattgatatgccagctaaagctcccaaaatgaagagagtgctggtccagtatagtctcttgttcagaacgatgatctcctgtgactttagagtttgtgctctgtatgttataaagatctttactaccaaagccttttcttgtgagaaattagggctctgtgtctttattagtaggacatgtgccatctcctcatagttatgttcactgtggttttctcaaaaacaaagccaagcataccttgatcagtgagatttgccattcaaaaaccagagagatgttcatacatgcataattgcatctttagcttttctatctccggcccccagagctgctttggggagttttattcttctagtttgagcagacacttctgtcatttcatttaaagtaaatgccacaatttacaagcccagcatcagttctcctccttggggatactgacagagaggaaatgggggctctttggtcctttccaagcacagcctcaaatgctatattttgaaaatagaaaatacataaaaatgacatggtaccaagtcagcaaacaatgcatagggaaattttgggtaaggcagaattgtgggagttagtgttggacacttgggttgtctgcgacctgtttacaaaaggtcataggtggttttcttggggtcattgcaaatagtcaactgaacaattcacatcagtccttgtggattacatttactgtacntaaaaggatcaaaaagagaaatggggaaaaaagatgaggacacaaggacagacttcntaaaacnttagtcaggtggaagccccnaggatcagtccnatgtttggttaatgccntttnctggaatttgcaaccaaattatttatatttgaaaatgtagtagagattgctaaacatttaaatataaggtataagacttcaatgttaactgttagagctaacttattgacagactggattctaccaagcaatgactgttatataaacttttccttaaaagttaaatatatggcatggctaaaatctacagaattgtgtagataaaaaaatatacnttgaatacatatcaaaaaaaaaaaaaaaaaaaaaa

SEQ ID NO: 407 - DNA, 4243 bp, Homo sapiens
  misc_feature (573)..(573): n is a, c, g, or t
  misc_feature (590)..(590): n is a, c, g, or t
  misc_feature (592)..(593): n is a, c, g, or t
  misc_feature (781)..(781): n is a, c, g, or t
  misc_feature (890)..(890): n is a, c, g, or t
  misc_feature (893)..(893): n is a, c, g, or t
  misc_feature (906)..(906): n is a, c, g, or t
  misc_feature (908)..(908): n is a, c, g, or t
  misc_feature (910)..(910): n is a, c, g, or t
  misc_feature (915)..(915): n is a, c, g, or t
  misc_feature (917)..(917): n is a, c, g, or t
  misc_feature (1347)..(1347): n is a, c, g, or t
  misc_feature (1349)..(1349): n is a, c, g, or t
  misc_feature (1366)..(1367): n is a, c, g, or t
  misc_feature (1374)..(1375): n is a, c, g, or t
  misc_feature (1377)..(1377): n is a, c, g, or t
  misc_feature (1402)..(1402): n is a, c, g, or t
  misc_feature (1451)..(1451): n is a, c, g, or t
  misc_feature (1463)..(1463): n is a, c, g, or t
  misc_feature (1570)..(1570): n is a, c, g, or t
  misc_feature (1578)..(1578): n is a, c, g, or t
  misc_feature (1625)..(1625): n is a, c, g, or t
  misc_feature (1627)..(1627): n is a, c, g, or t
  misc_feature (1640)..(1640): n is a, c, g, or t
  misc_feature (1664)..(1664): n is a, c, g, or t
  misc_feature (1671)..(1671): n is a, c, g, or t
  misc_feature (1778)..(1778): n is a, c, g, or t
  misc_feature (1781)..(1782): n is a, c, g, or t
  misc_feature (1787)..(1787): n is a, c, g, or t
  misc_feature (1822)..(1822): n is a, c, g, or t
  misc_feature (2479)..(2479): n is a, c, g, or t
  misc_feature (2503)..(2503): n is a, c, g, or t
  misc_feature (2507)..(2507): n is a, c, g, or t
  misc_feature (2605)..(2605): n is a, c, g, or t
  misc_feature (2810)..(2810): n is a, c, g, or t
  misc_feature (2815)..(2818): n is a, c, g, or t
  misc_feature (2823)..(2823): n is a, c, g, or t
  misc_feature (2863)..(2863): n is a, c, g, or t
  misc_feature (2924)..(2925): n is a, c, g, or t
  misc_feature (2933)..(2933): n is a, c, g, or t
  misc_feature (2935)..(2935): n is a, c, g, or t
  misc_feature (2937)..(2937): n is a, c, g, or t
ttttttttttttttttttttttttttttttacagataaatttgtttttaataaaggagttaattttctttcaatcctatataaaacaatagcaattaaaaacttcatttctgaaagtaaaatatttacatatgaacaagtaactgtgcaaaatttacatgaaaaaatggaaagacagggatttcctaaaagacaaaataaaaggtgtaacagttctcaggtgttgataaaaaatactgatcagcgttcagttcacacgcgctcgaattaaagtctaatgtgagaattcacacggagaaagccagagtatttacagtcataaaagtactatcaatagacaatttcatacaataacctctgaaaatagaaagaaccaattagtatatttgtaataaaaaaataggtacaaagaaggggctttgctctggacgtctgtaaagtcggcccaaggcttgcatacagtctcttagcaaaataattatagtttacatagccatttctatgtcatgtgccaaaagttatgtacaattactgacaaaatacaccaaccatttttcaacacttgattcacacngagaaacagtcttttgntnnttcttctcaactttgattttatttaatctaggttttcacttttagctaaaaaacacagtgcaagtaaaatatatttatgctgaaaaggttttcatctcttttaactttacagctttacaaactatagcaaataaaatgcatttgtacagatgctgaccacacattcagaaggagccacctttgctggnctcggcctctaccaagcagaaatgcgattacactctgaggtgggggtgcaacgatgaattgtgtattcctccaggattctcagcggagtggaggggaagggaggggagnggngggcagggggcananangagancngggtgggaggggaagggaaggaagataaatagtctaaaaaatcagtttgctttgccaactgactattacaaaaataaaataaacgaaatgaggtcatcggctgtagacatacacctacatagtaagttaggtagaactaaaccaaaatgcacaaataatgcagaaactgctatgagttgacagagggcagctaattatttgctaacgattccatcagtctttatatatggcttgtttggcaggaaggccactcaatcaagatgagttaagatttaattgtcctttaagagtatccacaggcctttgtgttctctctgttacagaaacgtgttttctttcacactgaagagctgatttagaaacaggaatataaaactgttccattgtaaagaggtggctgttttttaaacaatatcccatttgctcgttncnaaaaggcgtaatctgcnnatatatnnanagtccccaggcgtcctcctgtgtcncttaaggaatgctttgtagagcagcagtgaatggcttgtctcacgttcnttttctaaacanaatatgaggtccctgaggttgacccgcgtgattctttgtcgcgtgaactgtctgggggttccgacacccgagctgcctgggaccactgagccggggcccgacccctntgctcctnagcccggccccggacagtccactttcctctttttcctgggcccgatngntgctagtgctgtnaggttggcgtcccgctgtctcatntgtgccngttcctgttgctgcatctcctttgccttctgtttcagccttaactgttctggatcttcttgtcttgaccgagactttgctgccctcatcaggatctcccgctcctgntcnnccttnctctgcttttcgatttgatcaagctgttcaaaaancttgagctgtgcccggacgtcactcgcctgctcatatctgtcgtcatccttgtaagaaaagttcttctgctgagctgtttctgatattttctctacaagattctgtagcctttgttgcgtggcatgtgatacataacttactacatctggatgtaattccgttataccatgttttttacctatttctaatattcttctctgcaaaggcgcttggaggaggaaggtttcatctttacaggaccgcgttagcgtgcccaccaattcagagttcgtggctaatattcttgcactttcttctgacaagtttactccagccatcgatgcaacatcattaatgtcatcatcgtcccgaaacgaacctcccccaggctccttgagtttatttttctgtgcagcagctgcttgtgccgagacagcagaaagggctttggttccaggtaacacggcgggtttcaccacagggactggctgcagtgggttcagctggatctgctgaggcgtggtgagcatgatccggttgtgaggctgccgcagggcgaccatgggtgtctgcgtcaacgtcacctgcgggggccggatcagggctcctggcttcggaggctgctggatgaccagcggtgtgggttgcccctgcttgccgacgccgacctgcgtggnctgcgtgaggctgagcacaggggnctgnagggcactggtcacggtggccgccgtcttcccggccgtgcgctggaccgagctactcagcaccacggccgtgagcgcagtggtggcctgcgaggtggncggtggcggctgctgctggctctgctggatgaaggccgcggagtcgggggtcagctgtctcaaggcgggtaagctcctcttcaggaaaggcacaaggtaaggttgaggtgaagaattaagttctcggtataacctgcttgtgaaatcttctgcttctatttttccatccagtaaattctgcacgagctctttcacattagctgcngtctnnnnagacngcttgccagatgaagccagttttattaacgtagatagganatttttacatttcttcacgttttccatagtttccgtggcagctgaggaagtggtggtcgcnnctggtacngngngctgaggagtccccgtctgaacagccgtcgccgtcccaagtgaagccgtctgggcagcgccacccagaacgagctgaggctggacgccgggcgagcgctgcagggttgcactgggctgcaccgttgtctgggcctgagacacttgcttaattatggtagttggggtcacctgccgtgcaatgataggtgttccaggtgcctgtacggtggagatctggacgggaggggcacttgtgggggtggcagggcgaggcgccatggtggtctgaggctgggcatgggcctgcgcctgcatctgggccaaggcctgctgaggaatcattaacaactgcccattctcacttcggacgaggaccattcctgggggcagctggaagttctggatgttggtcgggttctgaggcggctgcggcaagcggggggccagcacggtgggcgtcagggtggcccgaatcccgctggtggtggccgtgggcgtccgggacaggctctgggtcactgcgccggccgcgcctttgggcagcccggtgggggtcccgggggcgggcggcgggacggcggccgggctgggcagcgccccttgcatagttggcccgatgaccatgctggccgccgtgctggccgggccgctggccgccagggtctgcgccgccgggggcgccgcctgcaccaccctcttgggcgactcggccttgacccccggcgccggcgccgcagccgccgcgccgggcccgggttggccgctgacccccgcggggcccccggcggccggggcgggggcgggggctgccccggcgctgcccccgttctgggcggcggcggggggcggcacggcgagcgcggcggtcgggggtccggcggggtggccgggcggccgggccagagtggcgggcgcggggggtggcgggggcggggcggcggcgggggcggcgggcttgggcagcggcagcagcgcggcgggcccgttgttgaccaggctgacagcaggtgcggcggcgtggtgcgagttcagcagcgcggcgctcccattcaaagtttgcgcggcgccggggccggcgggcttgccagggccggggccggggccggggccgggcccggggccggggccggcgcgggcggccagcgcggcggggccggcgggcttggcggggccggcgggggcgggctcgggccccgcggcgacggcggcggcggcgggcaccggggcgcaggcccccgcgctgccctcgggcggcggcctcagcttcgcggcgggcggcgcgggcccactttctcgtccacctcgctgttgaagaagacctcgtcc

SEQ ID NO: 408 - DNA, 2077 bp, Homo sapiens
ccgagcgccagcgcggggaaccgggaaaaggaaaccgtgttgtgtacgtaagattcaggaaacgaaaccaggagccgcgggtgttggcgcaaaggttactcccagacccttttccggctgacttctgagaaggttgcgcacagctgtgcccggcagtctagaggcgcagaagaggaagccatcgcctggccccggctctctggaccttgtctcgctcgggagcggaaacagcggcagccagagaactgttttaatcatggacaaacaaaactcacagatgaatgcttctcacccggaaacaaacttgccagttgggtatcctcctcagtatccaccgacagcattccaaggacctccaggatatagtggctaccctgggccccaggtcagctacccacccccaccagccggccattcaggtcctggcccagctggctttcctgtcccaaatcagccagtgtataatcagccagtatataatcagccagttggagctgcaggggtaccatggatgccagcgccacagcctccattaaactgtccacctggattagaatatttaagtcagatagatcagatactgattcatcagcaaattgaacttctggaagttttaacaggttttgaaactaataacaaatatgaaattaagaacagctttggacagagggtttactttgcagcggaagatactgattgctgtacccgaaattgctgtgggccatctagaccttttaccttgaggattattgataatatgggtcaagaagtcataactctggagagaccactaagatgtagcagctgttgttgtccctgctgccttcaggagatagaaatccaagctcctcctggtgtaccaataggttatgttattcagacttggcacccatgtctaccaaagtttacaattcaaaatgagaaaagagaggatgtactaaaaataagtggtccatgtgttgtgtgcagctgttgtggagatgttgattttgagattaaatctcttgatgaacagtgtgtggttggcaaaatttccaagcactggactggaattttgagagaggcatttacagacgctgataactttggaatccagttccctttagaccttgatgttaaaatgaaagctgtaatgattggtgcctgtttcctcattgacttcatgttttttgaaagcactggcagccaggaacaaaaatcaggagtgtggtagtggattagtgaaagtctcctcaggaaatctgaagtctgtatattgattgagactatctaaactcatacctgtatgaattaagctgtaaggcctgtagctctggttgtatacttttgcttttcaaattatagtttatcttctgtataactgatttataaaggtttttgtacattttttaatactcattgtcaatttgagaaaaaggacatatgagtttttgcatttattaatgaaacttcctttgaaaaactgctttgaattatgatctctgattcattgtccattttactaccaaatattaactaaggccttattaatttttatataaattatatcttgtcctattaaatctagttacaatttatttcatgcataagagctaatgttattttgcaaatgccatatattcaaaaaagctcaaagataattttctttactattatgttcaaataatattcaatatgcatattatctttaaaaagttaaatgtttttttaatcttcaagaaatcatgctacacttaacttctcctagaagctaatctataccataatattttcatattcacaagatattaaattaccaattttcaaattattgttagtaaagaacaaaatgattctctcccaaagaaagacacattttaaatactccttcactctaaaactctggtattataacttttgaaagttaatatttctacatgaaatgtttagctcttacactctatccttcctagaaaatggtaattgagattactcagatattaattaaatacaatatcatatatatattcacagagtataaacctaaataatgatctattagattcaaatatttgaaataaaaacttgatttttttgt

SEQ ID NO: 409 - DNA, 364 bp, Homo sapiens
  misc_feature (123)..(123): n is a, c, g, or t
  misc_feature (261)..(263): n is a, c, g, or t
  misc_feature (267)..(267): n is a, c, g, or t
ggcccacaggcccaccacagggattggtgaccagcattgaggggacactgagaaaagttcttcaggctgtttcttcccagccccgccacaggctatgctggcacctgagagagttcttatccnaccctgtgcggaactcctgctgagcagagtggctttgtattcttccttccaactcaggctgttggtgcactgctagagggctgctgtctctgacactgcagtagccacagtcgagcttgagctggctggtccagcagnnnctgntccgcagccctggggctcagaccagagcaatgctgtgagagtcctggtactggccagtgcagagactgcacatagcaagggctcaatgaagtttacc

SEQ ID NO: 410 - DNA, 5745 bp, Homo sapiens
cacagggcctgcagagaggggacccaccgggcaggatgcactggcttccagcaggccacgacatcaacggtgccctggagccctccaacatagacaccagcatcctggaggagtacatcagcaaggaggatgcctccgacctctgcttccctgacatctctgctccagccagctcggcctcctactcccacgggcagcctgcgatgcctggctccagcggggtccaccacctgagcccccctgggggtggaccctccccggggcgccatggtcccctcccacccccgggctacggcaccccgctgaactgcaacaacaacaacggcatgggcgctgcccccaagcccttcccggggggcaccgggccccccatcaaggctgagcccaaggctccctatgccccaggcacactgccggactctcccccagactcgggctccgaggcctactccccccagcaggtgaatgagccccacctcctgcgcacgataacccctgagacactgtgccacgtgggagtgccctcccgcctggagcatccgcccccacctccagcccacttgccaggccccccgccacccccaccacccccacctcactaccctgtcctgcagcgggatctgtacatgaaggccgagcccccgatcccccactacgctgccatggggcaggggctggtgcccactgatcttcaccacacccagcagtcccagatgctgcaccagctcctgcagcagcacggagctgagctccctacacacccctccaagaagaggaagcactctgaatcccccccgagcaccctcaatgcccagatgctgaatggaatgatcaaacaggagcctgggaccgtgacagccctgcctctgcaccccactcgagccccatcgccaccctggcctccccagggtccgctctccccgggccctggttccttgcctctcagcattgcccgtgtccagacaccgccttggcacccgccaggtgccccctccccaggcctcctgcaggacagtgacagcctcagtggctcctacctggaccccaactaccagtccatcaagtggcagcctcatcagcagaacaagtgggcgaccctgtacgatgctaactacaaggagctgcccatgctcacctaccgcgtggatgcggacaagggcttcaacttttcggtgggcgacgacgcctttgtgtgccagaagaagaaccacttccaggtgacagtgtacatcggcatgctgggcgagcccaagtacgtcaagacgcccgagggcctcaagcccctcgactgcttctatctgaagctgcacggagtgaagctggaggccctgaaccagtccattaacatcgagcagtcccagtcagaccggagcaagcggcccttcaacccggtcacggtcaatctgccccctgagcaggtcacgaaggtgactgtggggcggctgcacttcagcgagaccaccgctaacaacatgcgtaagaagggcaagcccaacccggaccagaggtacttcatgctggtggtggccctccaggctcatgcacagaaccagaactacacgctggccgcccagatctcagagcgcatcattgtgcgggcctccaacccaggccagttcgagagcgacagcgatgtgttgtggcagcgggcacaggtgcccgacaccgtcttccaccacggccgcgtgggcatcaacacagaccggccggatgaggcgctggttgtgcacgggaatgtcaaggtcatgggctcgcttatgcacccctccgacctgcgcgccaaggaacacgtgcaggaggtggacaccaccgagcaattgaagaggatctcgcgcatgcggctggtgcactacagatacaagcccgagttcgccgccagcgcgggcatcgaggccaccgcgccagagacaggtgtcatcgctcaggaggtgaaggagatcttgcctgaggctgtgaaagacaccggagacatggtctttgccaatgggaaaaccatagagaacttcctggtggtgaacaaggagcgcatcttcatggagaacgtaggggccgtgaaggagctgtgcaagctgacagacaacctggagacgcgcattgatgagctggagcgctggagccacaagctggccaagctgcggcggctcgacagcctcaagtccaccggcagctcgggcgccttcagccatgcagggagccagttcagtcgggcgggcagcgtcccccacaagaagaggccccccaaggtggccagcaagtcatcgtccgtggttccggaccaggcctgcatcagccagcgcttcctgcagggaaccatcattgccctggtggtggtcatggccttcagcgtggtgtccatgtccacactgtacgtgctgagcctgcgcacagaggaggacctggtagacactgatggcaggtccagccagagctttgggaccacgcagctccgacagtcccccttgaccacggggctaccaggcatacagccctctttgctgctggtgaccaccagcctcaccagctcggccccaggttctgctgtccgcaccttggacatgtgttccagccacccctgccctgtcatctgctgttcctcacccactaccaaccctaccactggtcctagtcttggccccagctttaaccctggccatgttctcagcccaagtcccagccccagcaccaaccgctcaggccccagccagatggcccttctgccagtcaccaacatcagagccaagtcctggggtctttcagtcaatggcattggccactccaagcatcacaagagtctggagcctctggccagccctgcagtccccttccctggggggcagggcaaagccaagaacagtcccagccttggtttccatggccgggcccgccgaggggccctccagtccagcgtgggccctgctgagcccacctgggcccagggccagtcagagccagtgccctccctgacctccatccaggtgctggagaattcgatgtccatcacctcccagtactgtgctccaggggatgcctgcaggcctgggaacttcacctaccacatccctgtcagtagtggcaccccactgcacctcagcctgactctgcagatgaactcctcctcccccgtgtctgtggtgctgtgcagcctgaggtcaaaggaggaaccatgtgaggaggggagccttccacagagtctccacacccaccaggacacccagggcacctctcaccggtggccaataaccatcctgtccttccgtgaattcacctaccacttccgggtggcactgctgggtcaggccaactgcagttcagaggctctcgcccagccagccacagactaccacttccacttctaccgcctgtgtgactgagctgccctcctgaggcagcaccacaccagggaccaggggtgcccaggcaccccccaacactggatgcaatggtgttacactggagcccgctgcaggccagctctgctgttcactggccctacccgagactggtgaaactggaagtcttcacactggagttgctgttccagctggtcgcccctcacggcacagagggaacctgagagccagagacttcttgggccttcctgcctgccaccccctaggggccaggacaggaccagtttacctctttccagatatggtggttggagggctggttcaggtgccctggagggaaggggaagcctgtggccctgatttgttcagagcccattctcccttgcctccccttttgagactggagccaacccttttggagagaggacctgcccacctttgagatcagcagggggctcggatccagccctaagagacttgggtggacccccatgagtcaatggagggcagacggctctcccccttaaagctgttccctgggggatggcttggtagtggactttctggggtttgcctgttacgccagactcggacttctaagctttaagtgtggcccaggaggtttcttctccctgggagggcttggctcccaagaagtcccagggcagccgaggccagccctgcctgggttggagaaactgactttgtgccttaagtctactcagtgcctggtgaagccaccctcagcccttcacaggcctgaaccagtaggggccagtgggccaggtaagccctagagccttgaaccaggaatatccaggaagaggaaattccctttgagcccccagatggtattgcagcttcactgcctgcgttcctgggagcgtctggagctcacagtgatcagtgaccacatcattctctctgagcagaggagcaggaatccctcaagcagcagcctggtcttggctggtgggcagatgcaaatagcttttgctgttattaatgaagtaattactaaatgcacttaaaccagggcaggaaggaatggaaggatggagctagaaagctcagagtgggccagagcaggggtgtgacacttgcaaagacagggctctgactctgatccctcccagggagcctccgacacccatcccactcccaaccaccaagaccctgggttagggaagaagttgtatcttaagtgccaccttcaagtttcttagtggtgcctggtgcattccgaggctacatccaggctcatggaaggagtgtagtattcatttagccatgtctgccatgggtccagaaatgggaaagggaattgctgtccttgccctgtggtatgctgccacctctttgggaagcaggccttgcccctgtcccaccactcattctcagctttgaatgggaggcctttctatagtggaggcctttccttgaagcctatgaactgcaggcccccttttgccattgatctcaaagcacttgtcctcaggatagggaagagcagggggatgcaggaatagcagggatagcttgctcccagccccctccccaatttggttccgttgacataggaattttacgattcccaaaccatgcaggggctgagccttccttatgatgactttgttctccctcccactgggggaatcctccctatgccttaaaactgccgagccccactccatgtaataggattcctgggcttcctcaatgggggttcatgttcttggactgcgggccctcagtccttaactggaaagtgaccgtccactgccccatggagcccatctggacacagcacagccccaaaaccgttagcagctggctctgtttccaagcctggggaggggttcctcagtgcaggagttggggacaggctggggatccaagctgcttgagggggtcaaccttggaccaaagttgccttaagcctgtggtaaaagggcttcagggaaggtaagtgggccacctgctggaagctgccagctgcccggctggcaatggtgtgagtgtcttggccctgtccctgccctggggtccagcaggtcatccctcccttcttctctctcctttggcgtttgttcctgtagtcactgggctaatctccccctagcttcaagctgtacatagggcctcccagtgcaaatcctcctgcccataccgtgcacccttagaagcctgcgtgtgcatagagcgccccctacttcccagttaactcccagttcttctccctgagcttggtatttgtcatgtgccaactctgactctgaggtgggcagtgagggaagcagccccgggcctgcttgcttcctgtccccgaaatgttcgtttcttctgaagtaaatatacatatataaataaatgtataaatactgctttgtatctg

SEQ ID NO: 411 - DNA, 1299 bp, Homo sapiens
  misc_feature (157)..(157): n is a, c, g, or t
  misc_feature (209)..(209): n is a, c, g, or t
  misc_feature (269)..(269): n is a, c, g, or t
  misc_feature (305)..(305): n is a, c, g, or t
  misc_feature (381)..(381): n is a, c, g, or t
  misc_feature (385)..(385): n is a, c, g, or t
  misc_feature (439)..(439): n is a, c, g, or t
  misc_feature (530)..(530): n is a, c, g, or t
  misc_feature (555)..(555): n is a, c, g, or t
  misc_feature (557)..(558): n is a, c, g, or t
  misc_feature (593)..(593): n is a, c, g, or t
  misc_feature (596)..(596): n is a, c, g, or t
  misc_feature (611)..(611): n is a, c, g, or t
  misc_feature (655)..(655): n is a, c, g, or t
  misc_feature (675)..(675): n is a, c, g, or t
  misc_feature (685)..(685): n is a, c, g, or t
ttttgagatggagtctcgctctgtccccaggctggagtgcagtggcgccatctcggctcactgcaaactctgcctcccaggttcacgccattctcctgcctcagcctcctgagtagctgggactgcaggcgcccgccaccacgcccggctaattttntgtatttttaatagagatgggggttcaccgtcttagtaaggatggtctcganctcctgacctaatgatctgcccgcctcggcctcccaaagtgctgggattaccggcgtganccaccacgcccggccaatttttattttatcttattnaaataaccacatgtggctagtggctaatgtattgaacactacagctgtagacaatacgaaataaatataaagcagnctcnactttggaaaaacagaagactcttactgcctcataatatagatgaaaaatgaantactaagataagtaaaacgttctttaaagaacaaaaacaaaagaaaacctaatgaaagctataaaagtccattggataataatgctaccangtactaaggaagtacagcccctaananntgacttgcagtcacaaatataaaaatgactattcnaantgaactcctaaggtnaaaatttcttattcaccatgctccaaaatggtctgtaatattcntcagagatggcatggtgggngaggcaagtnggcatctctgcccagagagaatacacaagcagaaagttcaacaccgcttacctggtgaaaccctacaagcgtttccactccatacgcgctctgaataatgggattgtgatgtcttacaccaattctcaaactgggcggccagctgcagctgaatcaactccaggtgcccgtagttgcgataccaagagtagtagccgttcacacggatcacatccacatacagagcccccttgtctgctgcgtaggtggagttggtcacaaaggtcacaggctgggaggggtccaaggctttggtgtgagcaatcaccatcctcccacgagtacaggtaggcggggtgttcgtgcatcaggtacggccaccagaggttggcacccagcaccttcagctggccctgggtcccagcctggttgtccacgactttgttttctgcattcaaaagacacacttccaacttgaactggttactgcacttgacggagatctggtaattcaccagcctgtttgaaaaatagtctaaggctggttttacagggttgctcctatccatcacctgatgtgaagtttcttaggaagcttcaggactacaccaaagaagcagaacctgctctttcac

SEQ ID NO: 412 - DNA, 3110 bp, Homo sapiens
agacctcggcacccgttcagactgacagcagaggcggcgaaggagcgcgtagccgagatcaggcgtacagagtccggaggcggcggcgggtgagctcaacttcgcacagcccttcccagctccagccccggctggcccggcacttctcggagggtcccggcagccgggaccagtgagtgcctctacggaccagcgccccggcgggcgggaagatgatgatgatgtccctgaacagcaagcaggcgtttagcatgccgcacggcggcagcctgcacgtggagcccaagtactcggcactgcacagcacctcgccgggctcctcggctcccatcgcgccctcggccagctcccccagcagctcgagcaacgctggtggtggcggcggcggcggcggcggcggcggcggcggcggcggaggccgaagcagcagctccagcagcagtggcagcagcggcggcgggggctcggaggctatgcggagagcctgtcttccaaccccaccgagcaatatattcggcgggctggatgagagtctgctggcccgcgccgaggctctggcagccgtggacatcgtctcccagagcaagagccaccaccaccatccaccccaccacagccccttcaaaccggacgccacctaccacactatgaataccatcccgtgcacgtcggccgcctcttcttcatcggtgcccatctcgcacccttgcgcgttggcgggcacgcaccaccaccaccaccatcaccaccaccaccaccaccaaccgcaccaggcgctggagggcgagctgctggagcacctgagtcccgggctggccctgggcgctatggcgggccccgacggcgctgtggtgtccacgccggctcacgcgccgcacatggccaccatgaaccccatgcaccaagcagcgctcagcatggcccacgcgcacgggctgccgtcgcacatgggctgcatgagcgacgtggacgccgacccgcgggacctggaggcattcgccgagcgcttcaagcagcgacgcatcaagctgggggtgacccaggcagatgtgggctccgcgctggccaacctcaagatccccggcgtgggctcgcttagccagagcaccatctgcaggttcgagtccctcacactgtcccacaataatatgatcgcgctcaaacccatcctgcaggcatggctcgaggaggccgagaagtcccaccgcgagaagctcaccaagcctgaactcttcaatggcgcggagaagaagcgcaagcgcacgtccatcgctgcgccagagaagcgctcgctcgaagcctactttgccattcagcctcggccctcctctgaaaagatcgccgccatcgcggagaagctggacctgaagaaaaacgtggtgcgcgtctggttctgcaaccagaggcagaaacagaaaagaatgaaatattccgccggcatttagaagactcttggcctctccagagacgcccctttcctcgtccgctcttttctctcctctcttctgcctcttttcacttttggcgactagaaacaattccagtaaatgtgaatctcgacaaatcgaggactgaagagggagcgaacgagcgaacaactgagcccaagccggtgagaatgtgaaacagtttctcaaaggaaagaataacaaaagatggtatttgtctgttgtagcaaagttgtccctttgaaccccacctcggcttcttcagaggaagtgtggagatggctgtttgcaggaaggcagacgagacagtgtttaaaaagtccacaagaatgatcaagtaagatttgtttttattcttacagacatcacccgtgttcaagtttaaaagtacactttgcaactatttttcagaaatagaaattgattcaggactaaaactttaaactagagttgatgcttaatgtgatagagacatctctaaagtattttgaattttaaaaaaagatggcagattttctgcatttacactgtatattatatatatatttttattgtggttcttacccccttttccttctctgaagtgttaatgcttaagaaaagagttgcgcctgctgtgttcactgatcttgaaagctattattagattattgcagaacaaccctctgtaaattattaatttatctctctagcaacttaattttgtgcacattctaattaattaaacttcttccgtctaaaaaaagtgggggaaatgtatagctagtaacgttcaaaaaattttgtttgatgagtttaccgaatttttacagctttcctcctatactgtgttccttttgacccatttgtatattctcacttgaatgaagattgtttttttctttgtttttactggtagtgttctgatttgtgagtcgacactcagtaatggatgtcttaatcgtgtagacctgattcactgtctgaagtattgtttacttcgttacatatttaatggggattcccacattgtccccatgacacatgagcgctctcacttacccttacacacacacacacacacacacacacacctctaacagaagggaagaagcagttggaagcatgaccgatgcaccattttctagttttaggtgcatttgccacttggtgtttgcccttcagattttagatttcaccaaggtatttcagtcttccagttttcaattgctttgttggctacatgttaatatttataggaatacttcagtttttccttttggaggtttgtttgtagaaaaactaatttgaactataagaaagacagtgcactgcttgtaaattcacattgtttggaaaaattcttttggaacaaaaaattaggtacatgataactggtaccttatctactgtaaatatttcattaaaaatgatgcacacatagatatattcttacaaattttgctgtattgctgttctctttgaggctctccaaagtcttgagttctgtatatggcctggtttcttgtttttattaatagatggtttatttactatggtaatgtattaatttatttttggtgttgttcgattgtctttcattgaagagataattttaatgttttattggcaacgtatgctgctttttcattaaaatatgctattaaaattaaatggctttta

SEQ ID NO: 413 - DNA, 1844 bp, Homo sapiens
  misc_feature (33)..(34): n is a, c, g, or t
  misc_feature (38)..(41): n is a, c, g, or t
  misc_feature (64)..(67): n is a, c, g, or t
  misc_feature (172)..(172): n is a, c, g, or t
  misc_feature (964)..(964): n is a, c, g, or t
  misc_feature (1086)..(1086): n is a, c, g, or t
  misc_feature (1180)..(1180): n is a, c, g, or t
  misc_feature (1783)..(1783): n is a, c, g, or t
  misc_feature (1803)..(1803): n is a, c, g, or t
  misc_feature (1822)..(1823): n is a, c, g, or t
ttttttttttttttttttttttttttttttttnntttnnnnttttttttttttttttttttttnnnnttgtgctgttttttttttattgtgttttcaatggagaaatacatcatctgtttacaaaatagctcttgaaaaatacaaggagtacagatactataaaacaaagcnaactccagtcatgagacactacatacatcatgcgaaagcaacagtctgatctccaggttatgaaaactataattaaaaagtcactacacagaaaaggtccaagtttccagcttggcaaaacttgggtgcagttacatgaaacgtttaataaactgaattgttttccccaatgtgtaaacaaaatgacaagactaaatctgtgcctggtaatttcaatctaactctgaagctacacaaaacacacagacaccttgtacatttcacctgttagtatgaccatcttttttcttcggtggtggaaggaagggcaaggtgactgtgtaaagcaaagatgtgggaagtagaaatattgtttactagacattataaagtcatggtgaaaagaaagcttcgattaatgcatagcctaagggggaaaagactacactccaacttcagaaaattaatttagaaggataggggaagagattaagtaattgcagtttaacatgaaaaatgcacatgtgatagaatggagcacaatggaggattcataaaacatgctcatcagaaaaatctgttaagtcgactttgtccagattcagaaagagtaagtttatcaacatctggcatccctcatactttgtgaagatagatcttctactgcttaattatgagaaattattttattcaaagaaaggagctcttaatcttttgataaaacaaaataaaggagtagagagctgactagatgtcaagtgcttgctagaaatgatttttaaaatgcttctacacgtaaaatgtactgacaanttttggtaaaccatttaaaaataagaattagttttaaaatcttggagaaaatgcctttttgcccacatttaaaactgaaaatcaattttactatagataggagttctgtggagtgtacaaanttccttttagagatcaaatggccatcccagatagatatcatgtttcacaggcattacttttagtcaccctcaagtttcagccatgggaccaaantttagtgttctgtgccatgtggtcacagggtcattggtttcacatcatggcttaagaaaatactggcattttgtttcttacgaagtaagtcctaccttgtgcatacaagcaaaaagaaaaaggaagaaaacaggggagggaaaggcgcaagaagctttttttgtttgtttgttttgaagacaacagattgaaggcaaaagaacacagagctttcacaagctcaaagaaaaatatttgctggctgatcgctgatttgtatgcactataaaacaattccataaataaaaccaatatatcatttcttaatcatgaccctatcaaaaccaagttatttcctaactattctttcaatgtcaaatgtaccctagagttgacgtttcatttttaagggttacagctacctcataggaactgaactagatgtactcttaccctttctctgaagtataacagtacaccactgcacaacagtatccaatttgaagactaatggtaaagaaaattcttcaggaaaaactgaaaatccatcaagctgaaaatctaaaattagttctactttctaatgaaaaatacataaaagtgcatcatcagaataagtaattncttatgccagtttgtattgncaaattttccaaacaatgnntcaaacataaacccaatccag

SEQ ID NO: 414 - DNA, 2514 bp, Homo sapiens
cacgagggtgaattctgccctggacagggctttgcccttggaggatccccaggtggccttacccgtgattcttactcggcatcctccattccccaaactccctcctccctgttaaatgtcaacctagacctggacctgggtgggaggaaactgtagcctgagtgtccacagggacacacgtgagccacagggctagaagcacaggcccgtcaccccaggaggaaaagcccagggtctggggcagcagagccatcgcatcatgtttcccagggcaacttgaggtctgacttttggctccctcgccctaagaggctcttcctctcttttgctcatccaccttcacaccacttgtgagctgacccccaggaacagcttggctgttccaccagagcagagggaatcattgctggactggatttcttctggagggaagcaccatgaattaaaggtgccagagctccatgcatggaaaagtggcctgttggttcaacgtggtttccttgtacttgatcctcctgaaatgagagattttcctgagatgactgagtatggagattaccaggcagatgataccgaaatgcttaaaggggctgtggctgaggctgtagcatctctgctggaggtgagacactctgggaactgatttgacctcgaatgctcctaaaagagaacttgatagcctgacagcagagaagtattatttggtggggagtctgagaaagcctggcttgtattatctgtccaaaaggaagcctcttcatctcctggtgccttggttgactattttggaaataggcatatcaaggttcctgattcagcactttgctcttttaataacaaatcgtccaaagatctcaaagtaagggtttttttttttagcttccactcttccgcagacttggtcatcgacctatttttgttgaagaatgaaaggcaatgacaagtttaacatatacaaattcgtgaattcttgttcattttgcattcctgcagtcagtgctaatccgtcgttcttaatcaggagttctgccaggtttaaggtcacctgcactcccagccaagtggtgatgtatgcctcccactctctgcaaggttttcctcatttttatattcatttattcatcattcattcattcacctaactttcattaaatagctgcaccatcccaggccctgtgcggatcgggaatacaaagatgagataaaacattgtccctgcccccgggggcttcacatgccactggaaacaacagactcttaaactaacaattcaagcaggcgccaagtgctacgacagaggtgtgaataaaagcatcaggaaatcggatggagaaccaccattcacccaagggtcagaggaggtttcaaagaaaaggtgtcattggagcagtgttttgcagaatgagccagagttcaccaagcaggcaaggcaaggaagggtgttgcagagagggaacagcatatgcaaaggcatatcagttcatggcatcacatctttcactggggaagccagtttccacaggcagcatcccaaggttcaataaggccttatttaacaagcaagcaaaatgcaaaccaaaccattattcatttattggcttaagtatgctttctcctgaaaactttagcattgggtgcaaatattcagtatggttctcggagtccaaagggttttaagccagggcacaaccagaaaagtggctctctttggtagggagaggggctccaatatttcgttctctccccatggggcactgacagagaaatgaaatagttttatctggaaaattccagagctattatttactccttaccaagggaagttacttcttgtaaaaacttttaagccatttatcaacaagttcttgttgactcagggcataatgagttcctgagacatgctcttttgggggctggggctttaggtagaagaatttcaaggaaaagaattctcagcagagctcaagattgtagaaactcagcagaagctggtaaaaacatggggagcccggaggacaggctgctgtccagggcagaggccatgaagaagtgcttccgtggccgacagtctggaaatgaatccatcatacattagtgccatagagtttagtaaccgtccagcaagtgtcatcacttttacagaaaacaaggtccagtaatagcaagtcttagtacatcctcacttttattataaatgggtgttttttcataatttttactgacgctcagtaaccatgcaaaattgtgtatagcattaatgtatctacatacctacacctatctatatataagctcatggtagaaaaccatagctaagtagcatcgcagacttaagcgtacaaagtgatcttgttcacaagtaatctgttgacagtgccaataaatgataaaaaaaaaattaacatgtcacaatgtaacggatgaccatatgcacaattccatgaattaaatctgtttcctgtgttagtcagtattcttaaataaaatttataattgaaaaaaaaaaaaaaaaaa

SEQ ID NO: 415 - DNA, 2514 bp, Homo sapiens; identical to SEQ ID NO: 414

SEQ ID NO: 416 - DNA, 1600 bp, Homo sapiens
gaattccgggctgtagagcttgcccgcgcagtggggatggaacgttgctaggcttagcgggtctggctgctggaggcccgagcagcacgctcgagccgacgcgcgccaaagcgggaatctggaaggcgaagcagctctgcaagtttaatgcacgtatttaaaactcccgggcctgcggacgctatgcacaggaagcacctccaggagattccagacctgagtagcaacgttgccaccagcttcacgtggggatgggattccagcaagacttctgaactgctgtcaggcatgggggtctccgccctggagaaagaggagcccgacagtgagaacatcccccaggaactgctctcaaacctgggccacccggagagccccccacggaaacggctgaagagcaaagggagtgacaaagactttgtaattgtccgcaggcctaagctaaatcgggagaactttccaggtgtttcatgggactctcttccggatgagctgctcttgggaatcttttcctgtctgtgcctccctgagctgctaaaggtctctggtgtttgtaagaggtggtatcgcctagcgtctgatgagtctctatggcagaccttagaccttacaggtaaaaatctgcacccggatgtgactggtcggttgctgtctcaaggggtgattgccttccgctgcccacgatcatttatggaccaaccattggctgaacatttcagcccttttcgtgtacaggacatggacctatcgaactcagttatagaagtgtccaccctccacggcatactgtctcagtgttccaagttgcagaatctaagcctggaactgcggctttcggatcccattgtcaatactctcgcaaaaaactcaaatttagtgcgacttaaccttcctgggtgtcctggattccctaaatttcccctgcagactttcctaagcagctgtcccagactggatgagctgaacctctcctggtgttttaatttcactgaaaagcatgtacaggtggctgttgcgcatgtctcagagaccatgacccagctgaatctaagcggctacagaaagaatctccagaaatcagatctctctactttagttagaagatgccccaatcttgtccatctagacttaagtaatagtgtcatgctaaagaatgactgctttcaggaattttcccagctcaactacctccaacacctatcactcagtcggtgctatgatataatacctgaaactttacttgaacttggagaaattcccacactaaaaacactacaagtttttggaatcgtgccagatggtacccttcaactgttaaaggaagcccttcctcatctacagattaattgctcccatttcaccaccattgccaggccaactattggcaacaaaaagaaccaggagatatggggcatcaaatgccgactgacactgcaaaagcccagttgtctatgaagtatttattgcaggatggtgtctcttctttagaacagggaaaataggcaggaagcccaattgctggagtacttagctagttttattcttggttttcccttttgcctgtcattctgcaagtatactagggagcccattttgagag

SEQ ID NO: 417 - DNA, 1434 bp, Homo sapiens
ggcacgaggcgttgctaggcttagcgggtctggctgctgggggcccgagcagcacgctcggagccgccgcgcgccaaagcgggaatctgggaggcgagcagctctgcagttaatgcacgtattttaaactcccgggcctgcggacgctatgcacaggaagcacctccaggagattccagacctgagtagcaacgttgccaccagcttcacgtggggatgggattccagcaagacttctgaactgctgtcaggcatgggggtctccgccctggagaaagaggagcccgacagtgagaacatcccccaggaactgctctcaaacctgggccacccggagagccccccacggaaacggctgaagagcaaagggagtgacaaagactttgtgattgtccgcaggcctaagctaaatcgagagaactttccaggtgtttcatgggactcccttccggatgagctgctcttgggaatcttttcctgtctgtgcctccctgagctgctaaaggtctctggtgtttgtaagaggtggtatcgcctagcgtctgatgagtctctatggcagaccttagacctcacaggtaaaaatctgcacccggatgtgactggtcggttgctgtctcaaggggtgattgccttccgctgcccacgatcatttatggaccaaccattggctgaacatttcagcccttttcgtgtacagcacatggacctatcgaactcagttatagaagtgtccaccctccacggcatactgtctcagtgttccaagttgcagaatctaagcctggaaggcctgcggctttcggatcccattgtcaatactctcgcaaaaaactcaaatttagtgcgacttaacctttctgggtgttctggattctctgaatttgccctgcagactttgctaagcagctgttccagactggatgagctgaacctctcctggtgttttgatttcactgaaaagcatgtacaggtggctgttgcgcatgtgtcagagaccatcacccagctgaatcttagcggctacagaaagaatctccagaaatcagatctctctactttagttagaagatgccccaatcttgtccatctagacttaagtgatagtgtcatgctaaagaatgactgctttcaggaatttttccagctcaactacctccaacacctatcactcagtcggtgctatgatataatacctgaaactttactattagtgacaagagctggggttaggatccggttggactctgacatcggatgccctcaaacatacagaacttccaaactcaagtccagccataagctattttgccaacatgtcagagtaatctgtatttttgtatgtgatttctacttttatagacttgttttaaaacaataaaacacatttttataaaaatgagtgcttaaaaacaaaaaaaaaaaaaaaaaaaa

SEQ ID NO: 418 - DNA, 334 bp, Homo sapiens
cagtctgccctgactcagcctgcctccgtgtctgggtcgcctggacagtcgatcaccatctcctgcactggaaccagcagtgacgttggtgcttataactatgtctcctggtaccaacagcacccaggcaaagcccccaaactcatgatttatgaggtcagtaatcggccctcaggggtttctaatcgcttctctggctccaagtctggcaacacggcctccctgaccatctctgggctccaggctgacgacgagggtgattactactgcatctcatatacaagtagcaaccctctcgtggttttcggcggagggaccaagctgaccgtcctag

SEQ ID NO: 419 - DNA, 5160 bp, Homo sapiens
gttccaggtgcaagcgccgggtttgctgcccgctgggcgcccctgcagcggcccgagctgtggccggcgtggatgaggggcaggcgaggcagggccgcccctccagtattgccgcccctcccgccccagggcagggctgggagggtacagcccgggggcgggctcgggtcgcctcccggccgccgcgtcctcgctgccccgggccgggcgggcgggcgccgagagcctcccagcccgccccgtgccccgcccgcccggctgcttccgcggcggcgctgcccgcacatgggctaggctgccaggatgttcagcttcgaaggcgacttcaagacgcggcccaaggtgtcccttggcggcgcgagcaggaaggaggaaaaggcttctcttttacatcgtactcaggaagaaagaagaaagagagaggaagaaaggcgaaggttgaaaaatgcaataattatccagtcatttattcgaggctatagagacagaaaacagcaatattccatccaaagaagtgcatttgatcgctgtgctaccttgtcacagtccgggggcgcttttcccattgctaatggccccaaccttacccttttggtaaggcagcttctgtttttttacaaacaaaatgaagactcaaaacgtttgatatggctgtatcagaacttaattaaacacagctctctgtttgtcaagcagttggatggatctgagagacttacatgcttatttcagataaaaagattgatgagcctctgttgcaggttgctgcaaaactgtaatgatgacagtttgaatgttgcacttccaatgagaatgcttgaagtattttcgtctgagaatacttacttgcctgttttacaagatgctagctatgtggtgtcagtgattgaacaaattttgcactacatgattcacaatgggtattataggtctctatatttgttgattaacagcaagcttccatcaagtattgaatattctgatttatctcgagttcctatagcaaaaattttgctagagaatgttctaaaaccattgcactttacttacaactcctgtccggaaggtgcgaggcaacaagtttttacagccttcacagaggagtttctggcagcaccttttacagatcagatttttcatttcatcattccggcgcttgcagatgcgcagaccgttttcccttacgagccctttctgaatgcactgttgttaatagagagtagatgttcaagaaagagtggtggagcaccctggcttttctatttcgttttaactgttggcgaaaattatttgggggccctctctgaggaagggctgctggtgtatttgcgggtgctgcagaccttcctctctcagttaccagtctctcctgccagcgcgagctgtcacgactcagccagtgactctgaggaggagagtgaagaagccgacaagccctcaagcccggaggatggcagactgtcagtatcatacataacagaggaatgcctgaagaagctggacacaaagcagcagaccaacaccctgctcaacctggtgtggagggactctgcgagcgaggaggtcttcaccaccatggcctccgtctgccacacgctgatggtgcagcaccgcatgatggtacccaaagtcaggcttctctacagtttagcctttaatgccaggtttctgagacatctttggtttctaatatcttccatgtcaacacggatgatcacagggtctatggtaccgttgcttcaggtgatatccaggggttctcctatgtcttttgaagattctagtcgaatcatcccactcttttacctttttagctccttgtttagtcattcactaatttccatacatgataacgaattcttcggtgatcccatagaagttgtaggtcaaagacaatcatcaatgatgccttttactttagaagagctgataatgttgtctcgatgccttcgagatgcatgcctggggatcatcaagttggcttatccagaaaccaagccagaagttcgagaagaatatattacagcatttcagagtattggagttactactagctctgaaatgcaacaatgcatacagatggaacagaaaagatggattcagttatttaaggttatcaccaatctagtgaaaatgttgaagtccagagacacgaggagaaatttttgtcctccaaaccactggctgtcagaacaagaagatattaaagcagataaggtcactcagctctatgtgccagcatccagacatgtgtggaggttccggcggatggggaggataggcccgctgcagtccaccctggacgtgggtttggagtccccgccgctgtctgtgtctgaggaaagacagcttgctgtcctgacagagttgccttttgtggttccatttgaggaacgagtaaagatctttcagaggttgatttatgcagataagcaagaagttcaaggagatggtccatttctggatggaattaatgtcacaataagaagaaattacatttatgaagatgcttatgacaaactttctccagaaaatgagcctgatttgaaaaagcggatccgtgtgcacttgctcaatgcccatggcctggatgaagctggcattgatggtggtggtattttcagagagtttttaaatgaactactgaagtcaggatttaaccccaaccaggggttctttaagactactaatgaagggcttctgtaccccaacccggctgctcagatgcttgtgggagattcttttgccagacattactacttcctagccagaatgcttggaaaggctctctatgagaacatgctggtggagctgccctttgcaggcttctttctttccaagttgcttggaaccagtgccgacgtggacattcaccacctcgcctccctagaccctgaggtgtataagaatttgctctttctgaagagctacgaagacgatgtggaggagcttgggctgaacttcactgtggtgaacaatgacctgggagaggcgcaggtagttgaactaaaattcggtgggaaagacatccctgtcaccagcgccaaccggattgcgtacatccacttggtggcagactacaggctgaacaggcagatccgccagcactgcctggctttccgccagggccttgccaatgtcgtcagcctcgagtggctccgaatgtttgatcagcaagaaattcaggtattaatttctggtgcacaagttcccataagcctagaggacctaaaatcctttacaaactattcaggaggctattctgcagaccatcctgttattaaggtcttctggagagttgtggaagggttcactgatgaagaaaagcgcaaactgctgaagtttgtaacaagctgctctcgaccccctctcttggggtttaaggagttgtatcccgcattttgtattcacaacggaggctccgaccttgagcggctccccacagccagcacctgcatgaacctgctgaagctccccgagttctatgacgagacacttttgcgaagtaaacttctctatgcgattgaatgtgccgctggctttgagctgagctgaagctgatgctggggtcagacccctacagagaaccagtgcttccttcgtcagcagcgcctccccagacccacgaggatactcacactgcacgcctgaggctctcctaagctccttctttcattctgccattcctccctcccttccttttttaaatgatttttattacggtgtggtcacttatttagatggacattgcttttcaaataacttaaaataacacgttatgtgccatgtggctactttagtaatattgccaagaagagcacagtttttacactagtggcatctcagtgaaattaaccaaagatgaagctttggctttgctggtgagatcagagccctcctgagcaggcagcgccactccagggttcagacagggctgcacaggcggcagagatacagggtctgagggctgagacgccatggggccgctgctgcttatgtggttggattgtttacaagcctcattattaaaactgaaggcattttttttttctgctgcctttcccaaagtggttaggtttggaaaagagatgatgatggtaatattttatttgtgctttttaagccatttccccaaatgggactagcatgcttgttttcagtataccgtggcctgcctcatgatggtttggagatactgtctgtggatgtgaggtggggacttcattcattgtcctatttctatctccactttgtgcctggagagctttcaggggaggtggaggaggagggtctgccaagctactgcaacatctgtcacccactatacccagttacttgggggaggacagacactgtggtgtcattaaagttgtttgaaccaaagtggcggctgcatctttgtcccgatgctagccgtgccggtctcccatcatccgctcgccctcctttcccctgggctgcgcccacttgtcttcctggatatttgggggtgactcgccatgcttggcaccctctgcttcctggtgctgctctgactcgaagacgggacagtccctggtgcacatccagggaagaggagtgtcggtagttcttgcagtaggcactttatcaggacctgacctgttgctgggtgattttagtctctacaaacagaaagcgtttcaaagcgtcagctgtgggagcagagtgaccctttgctgatgctggggggaggggatctaaatcctcatttatctcttctatgtctagtattttactgtcactggaggctctgtgggctgtcatagttaattgaccataattagcaatatacttttaaagtgggaaagctgaatgacacttttaagacaatgaacattatcaaaacaaaatgtataatttcttaatttgaataataagcgtttaaatgctatttgtagtcttgatatacagaaataaaataattagggttggtcttttttattttaggttttatgttgaatgttctatatcttattagttaatttgtatattttattagtattttggaaatagcatatctgagactgaggagaaattgacaattcacttatttgtggtttttttctcagctattctgagcttatttatttatttgtatgttctaatggctaaacatttacattaaatattttttttccc

SEQ ID NO: 420 - DNA, 4644 bp, Homo sapiens
  misc_feature (1188)..(1189): n is a, c, g, or t
  misc_feature (1191)..(1191): n is a, c, g, or t
  misc_feature (1193)..(1193): n is a, c, g, or t
  misc_feature (1200)..(1200): n is a, c, g, or t
  misc_feature (1296)..(1296): n is a, c, g, or t
  misc_feature (1307)..(1307): n is a, c, g, or t
  misc_feature (1311)..(1317): n is a, c, g, or t
  misc_feature (1319)..(1320): n is a, c, g, or t
  misc_feature (2082)..(2082): n is a, c, g, or t
  misc_feature (2102)..(2104): n is a, c, g, or t
  misc_feature (2108)..(2108): n is a, c, g, or t
  misc_feature (2211)..(2212): n is a, c, g, or t
  misc_feature (2216)..(2216): n is a, c, g, or t
  misc_feature (2219)..(2222): n is a, c, g, or t
  misc_feature (2224)..(2229): n is a, c, g, or t
  misc_feature (2231)..(2233): n is a, c, g, or t
  misc_feature (2241)..(2242): n is a, c, g, or t
  misc_feature (2245)..(2245): n is a, c, g, or t
  misc_feature (2774)..(2774): n is a, c, g, or t
  misc_feature (2834)..(2834): n is a, c, g, or t
  misc_feature (3026)..(3027): n is a, c, g, or t
  misc_feature (3145)..(3145): n is a, c, g, or t
  misc_feature (3182)..(3182): n is a, c, g, or t
  misc_feature (3332)..(3332): n is a, c, g, or t
  misc_feature (3375)..(3375): n is a, c, g, or t
  misc_feature (3538)..(3538): n is a, c, g, or t
  misc_feature (3588)..(3588): n is a, c, g, or t
  misc_feature (3614)..(3614): n is a, c, g, or t
  misc_feature (3865)..(3865): n is a, c, g, or t
  misc_feature (3942)..(3942): n is a, c, g, or t
  misc_feature (3952)..(3952): n is a, c, g, or t
  misc_feature (4244)..(4244): n is a, c, g, or t
  misc_feature (4332)..(4335): n is a, c, g, or t
  misc_feature (4495)..(4497): n is a, c, g, or t
  misc_feature (4504)..(4504): n is a, c, g, or t
gcggccgctgacagcaccagcatgtcttacagtgtgaccctgactgggcccgggccctggggcttccgtctgcaggggggcaaggacttcaacatgcccctcactatctcccggatcacaccaggcagcaaggcagcccagtcccagctcagccagggtgacctcgtggtggccattgacggcgtcaacacagacaccatgacccacctggaagcccagaacaagatcaagtctgccagctacaacttgagcctcaccctgcagaaatcaaagcgtcccattcccatctccacgacagcacctccagtccagacccctctgccggtgatccctcaccagaaggaccccgctctggacacgaacggcagcctggtggcacccagccccagccctgaggcgagggccagcccaggcaccccaggcaccccggagctcaggcccacctttagccctgccttctcccggccctccgccttctcctcactcgccgaggcctctgaccctggccctccgcgggccagcctgagggccaagaccagcccagagggggcccgggacctactcggcccaaaagccctgccgggctcgagccagccgaggcaatataacaaccccattggcctgtactcggcagagaccctgagggagatggctcagatgtaccagatgagcctccgagggaaggcctcgggtgtcggactcccaggagggagcctccctattaaggaccttgccgtagacagcgcctctcccgtctaccaggctgtgattaagagccagaacaagccagaagatgaggctgacgagtgggcacgccgttcctccaacctgcagtctcgctccttccgcatcctggcccagatgacggggacagaattcatgcaagaccctgatgaagaagctctgcgaaggtcaagcacccctattgagcatgcgccggtgtgcaccagccaggccaccaccccgctgctgcccgcttctgcccagccacctgctgctgcctctcccagtgcggcttcgccacccctggccacagctgctgcccacactgccatcgcctccgcctccaccacagcccctgcttcaagtcctgccgacagcccaaggccccaggcctcttcctacagccccgcagtggccgcctcttcagcacctgccacccacaccagctacagtgagggccccgcnncncntgcaccncaagccccgggttgtcaccactgccagcatccggccttctgtctaccagccagtgcctgcatctacctacagcccgtccccaggggccaattacantcccactcccnacannnnnnncnntgcccctgcctacaccccctcccctgcccctgcctacaccccctcacctgtccccacctacactccatccccagcaccagcctataccccctcacctgcccccaactataaccctgcaccctcggtggcctacagcgggggccctgcggagcctgccagccgtccaccctgggtgacagatgatagcttctcccagaagtttgccccgggcaagagcaccacctccatcagcaagcagaccctgccccggggaggcccagcctacaccccagcgggtcctcaggtgccaccacttgccagggggaccgtccagagggctgagcgattcccagccagcagccggactccactctgcggtcactgcaacaatgtcatccggggcccatttctggtagccatgggccgttcttggcaccctgaagagttcacctgtgcctactgcaagacttccctggcagatgtgtgctttgtggaagagcagaacaacgtttactgtgagcgatgttatgagcaattctttgccccgctgtgtgccaagtgcaacaccaaaattatgggggaagtaatgcatgccttgagacagacatggcacaccacctgcttcgtctgtgcggcctgcaagaagccttttgggaacagcctcttccacatggaagacggggagccctactgcgagaaagactacatcaatctgttcagcaccaagtgccatggctgcgatttccccgtggaggctggcgacaagtttatcgaagccctggnccacacttggcacgacaccnnncttnatttgcgcagtctgccatgtgaatctggaggggcagccgttctactccaagaaggacagacccctgtgcaagaagcacgcacacaccatcaacttgtaggcgnncaangcnnnntnnnnnnannnggcccggnnctnctcctgctgctggcaacaaaggattcgggaggctgatgtttcttctgaggggaatggggagagagaggaagcgactgagccctttggaagtataattttaggttttttcttctgtacacagatcgtgcatttgcatagttcagactaggagccaaatgaagactcaaaaccaagctagttattaatccaagactggaattgtacttcagacatttagagcagaattccaagaactcaaaagtgaaaagcaacaagcagctttcccaaagcgatacacttgctttggtcaccagaggaggacagagcttagagcagctgtggagaatctgaagcattctgcggagttcttaagcgctcccctggcaaacaaattgaagtgccaaacagcactcgctgcagggtatttttagagtcatagctgagagcttgttagctaagacccattgggctttcctcaccaaaaaaggaagtgttattccattactagcgtcatggagctacctctgcgcatcagacttcagaccttgancaaacttaaaaccttcttgggagcccggacgtccaaagagatgtcttctgggagccactnggcaattgccagggctccaggaagggctctggctcaggttgcagacagctgagaaaagatggccctgtcagccaccctctctcagtctgaaacatccaacatccccagaaggcttagctcctttttgaattgtgatgggaaagtagagttgggtttttccagttttgctctgtggtgtgtgagagatttttnnaaaggctttgggttgtctttggcctttgtttagctttaagggttcgttagcatgagtgtccagtcgtgtgcatgaatttcaccccaacttgtgactgctcacttatgacgtctccccnagtaccctccatctcaaataggcttggtggcctgtgnaaaagaagagagacagagagacagtgtctgaaacaggatggcagaataggctcacatgcccaaactctgggtggggaagaggaaacttactttctgccaccctcagtaagaacacacgaggaggcaggacctcccaccttcaggtctgcntcatccttttcaaatgttcctttaaatgcagcacactgagttngtacaattgtgttaactgctggaagggacagatgcactgatatatatgcatttgctgttttggccaatattttgaaaatgtatgagctgagttgatctagctattatttaagtatttattgaagtagaggggccttcaaactactttatactagtgatagttngagttaggtaagcatcttaaagctgtttggtgataaagaaggcagcttangattctgtggttggaaacagtgtagntcgcttccctttttaggaagccctgttaatatgctcattgaaaacatggcattgaagcaggcacttgcgtggatgtttctcacttgagcacgatatttaggctctcttccaactcactctattctgtcctcactcctgttttggatttttctctttgcatgtttgaaatgttttatgggaatgtattagaactcttttcttctaaggactgagacttccaggggattgccatcttacctgtctcttctccnatgagggagaaggaagcagctagctatgtccctagctgcaggaagcccctattttttccaagcacgaagccaccagntctcccccanggagcatcaggaagggacatggatgtgctcctgccacagggcccttcctacctttggatctgtgagaaggtgaatacaaagcagcaggcagagtaaaatctgctgggactgcctggagatttgtcaggagctgcagacaagtaccttggagcattctgttatttttggaaagttcaaatatgcagggacaaggaggttgctgactgtactgacaggctctaagtcattttctccaaaaactatctattcaattatcaggggctggtcttgaggaaggaaaaaaaaaaaaaancgttcccagaattcagtttccaaaatctctttttaaagggtttacacacacacacacacacacacacacacacacacacacacacacnnnngatcattaaaaagtgtatgctctttaagaagaaaagtaaaatatctcaaaggacggtttcaccaccgtcctttattgaatcaatttttctacatttcagagcaagtgtagattctgagggactcctatttgccaaaaagacaaaactagcaaaaaaaaannnaaaaaancaaaaaaaaaaccacttaaaaggtagcaggaaaagaaggtagttttgagtgtggttcactcagtgtctgtgagtctggtgtagtgtcaggagtaaggccgtgtctagctcaagtttacatttggatgtcctacaaccact

SEQ ID NO: 421 - DNA, 3433 bp, Homo sapiens
  misc_feature (523)..(523): n is a, c, g, or t
  misc_feature (1534)..(1534): n is a, c, g, or t
atgtcttacagtgtgaccctgactgggcccgggccctggggcttccgtctgcaggggggcaaggacttcaacatgcccctcactatctcccggatcacaccaggcagcaaggcagcccagtcccagctcagccagggtgacctcgtggtggccattgacggcgtcaacacagacaccatgacccacctggaagcccagaacaagatcaagtctgccagctacaacttgagcctcaccctgcagaaatcaaagcgtcccattcccatctccacgacagcacctccagtccagacccctctgccggtgatccctcaccagaaggtggtagtcaactctccagccaacgccgcctcttcagcacctgccacccacaccagctacagtgagggccccgccgcccctgcacccaagccccgggttgtcaccactgccagcatccggccttctgtctaccagccagtgcctgcatctacctacagcccgtccccaggggccaattacagtcccactccctacacccccncccctgcccctgcctacaccccctcccctgcccctgcctacaccccctcacctgtccccacctacactccatccccagcaccagcctataccccctcacctgcccccaactataaccctgcaccctcggtggcctacagcgggggccctgcggagcctgccagccgtccaccctgggtgacagatgatagcttctcccagaagtttgccccgggcaagagcaccacctccatcagcaagcagaccctgccccggggaggcccagcctacaccccagcgggtcctcaggtgccaccacttgccagggggaccgtccagagggctgagcgattcccagccagcagccggactccactctgcggtcactgcaacaatgtcatccggggcccatttctggtagccatgggccgttcttggcaccctgaagagttcacctgtgcctactgcaagacttccctggcagatgtgtgctttgtggaagagcagaacaacgtttactgtgagcgatgttatgagcaattctttgccccgctgtgtgccaagtgcaacaccaaaattatgggggaagtaatgcatgccttgagacagacatggcacaccacctgcttcgtctgtgcggcctgcaagaagccttttgggaacagcctcttccacatggaagacggggagccctactgcgagaaagactacatcaatctgttcagcaccaagtgccatggctgcgatttccccgtggaggctggcgacaagtttatcgaagccctgggccacacttggcatgacacctgcttcatttgcgcagtctgccatgtgaatctggaggggcagccgttctactccaagaaggacagacccctgtgcaagaagcacgcacacaccatcaacttgtaggcggccaaggccgcctgtgctgacgaggcccggagctgctcctgctgctggcaacaaaggattcgggaggctgatgtttcttctgaggggaatggggagagagaggaagcgactgagcccnttggaagtataattttaggttttttcttctgtacacagatcgtgcatttgcatagttcagactaggagccaaatgaagactcaaaaccaagctagttattaatccaagactggaattgtacttcagacatttagagcagaattccaagaactcaaaagtgaaaagcaacaagcagctttcccaaagcgatacacttgctttggtcaccagaggaggacagagcttagagcagctgtggagaatctgaagcattctgcggagttcttaagcgctcccctggcaaacaaattgaagtgccaaacagcactcgctgcagggtatttttagagtcatagctgagagcttgttagctaagacccattgggctttcctcaccaaaaaaggaagtgttattccattactagcgtcatggagctacctctgcgcatcagacttcagaccttgaacaaacttaaaaccttcttgggagcccggacgtccaaagagatgtcttctgggagccactgggcaattgccagggctccaggaagggctctggctcaggttgcagacagctgagaaaagatggccctgtcagccaccctctctcagtctgaaacatccaacatccccagaaggcttagctcctttttgaattgtgatgggaaagtagagttgggtttttccagttttgctctgtggtgtgtgagagatttttttaaaggctttgggttgtctttggcctttgtttagctttaagggttcgttagcatgagtgtccagtcgtgtgcatgaatttcaccccaacttgtgactgctcacttatgacgtctcccccagtaccctccatctcaaataggcttggtggcctgtggaaaagaagagagacagagagacagtgtctgaaacaggatggcagaataggctcacatgcccaaactctgggtggggaagaggaaacttactttctgccaccctcagtaagaacacacgaggaggcaggacctcccaccttcaggtctgcatcatccttttcaaatgttcctttaaatgcagcacactgagtttgtacaattgtgttaactgctggaagggacagatgcactgatatatatgcatttgctgttttggccaatattttgaaaatgtatgagctgagttgatctagctattatttaagtatttattgaagtagaggggccttcaaactactttatactagtgatagtttgagttaggtaagcatcttaaagctgtttggtgataaagaaggcagcttagattctgtggttggaaacagtgtagtcgcttccctttttaggaagccctgttaatatgctcattgaaaacatggcattgaagcaggcacttgcgtggatgtttctcacttgagcacgatatttaggctctcttccaactcactctattctgtcctcactcctgttttggatttttctctttgcatgtttgaaatgttttatgggaatgtattagaactcttttcttctaaggactgagacttccaggggattgccatcttacctgtctcttctccatgagggagaaggaagcagctagctatgtccctagctgcaggaagcccctattttttccaagcacgaagccaccagtctcccccagggagcatcaggaagggacatggatgtgctcctgccacagggcccttcctacctttggaatctgtgagaaggtgaatacaaagcagcaggcagagtaaaatctgctgggactgcctggagatttgtcaggagctgcagacaagtaccttggagcattctgttatttttggaaagttcaaatatgcagggacaaggaggttgctgactgtactgacaggctctaagtcattttctccaaaaactatctattcaattatcaggggctggtcttgaggaagga

SEQ ID NO: 422 - DNA, 1778 bp, Homo sapiens
aaagcgtcagagcggtccgctcttctcaagtcctattggctcaagtccatgcgtctcatggcactgccgggtgagaggcggaaaaaggccttcccaggcgcgagaagatgacgtcacagtagcccggccgggcgccgaggttgccttagggctctctgcccagtaacaggcatcgaacggtgcagactgaagacgccctccgtcagcgacgccgtcgcaatggccatttgtcaattcttccttcaaggccggtgccgctttggagatcggtgctggaacgaacatcccggtgctaggggtgcaggaggaggacggcagcaaccgcagcagcagccttcaggtaataatagacgtggatggaatacaactagccagagatattccaatgtcatccagccatccagtttctccaaatccacaccatgggggggcagcagagatcaagaaaagccatatttcagttcttttgattctggagcttcaactaacaggaaggaaggctttggattgtctgagaacccatttgcttcacttagtcctgatgagcagaaagatgaaaagaaacttctggaaggaattgtaaaagatatggaggtttgggaatcatcagggcagtggatgttttctgtttattcaccagtgaaaaagaaacctaatatttcaggttttacagacatttcaccagaggaattgaggcttgaataccataacttcttaaccagcaataacttacagagttatctaaattctgtccaacgtttaataaatcaatggaggaacagggtaaatgaactgaaaagtctaaatatatcaactaaagtagctttgctctctgatgtaaaggatggagtaaatcaagcagcacctgcatttggatttggcagcagtcaagcagcaacatttatgtcgccaggctttccagtcaataacagcagcagtgataatgctcagaactttagttttaaaacaaactctggatttgctgctgcctcttctggaagccctgctggttttgggagttccccagcatttggagctgcagcctctaccagttcaggtatctctacttctgctccagcttttggatttgggaagcctgaagtcacatcggctgcatcattttcattcaaaagccctgcagcttccagttttggatcacctggattttcaggacttccagcttccttggcaacaggtcctgtcagagctccagtggccccagcctttggaggtggcagttctgtggctggttttggtagtccgggctcacattctcacactgctttttctaagccatccagtgacacttttggaaatagcagcatatccacttctctgtcagcctcaagcagcatcattgcaacagataatgtgttattcacacccagagataaactaacagtagaagaactggaacaatttcaatccaagaaatttactctgggaaaaattccattaaagcctccacctctggaacttctaaatgtttaaaagggcaattttaaatacaaaaaagaatgatgtttaaaattgctttgagtgattcatacagagatgtatatatgcatacatgtatatattcataaggaatataagcttccatcaatagtgattttaaatttgatttttttcttaactctaaatatttaagtaaaaagtaacaaaaactctgcaagcaagggaatttttttgtactgtaattttgaatggaactgaaaaattatgcacgaataaagtacttttctcatgccgggaccaaaaaaaaaaaaaaaaaaaaa

SEQ ID NO: 423 - DNA, 306 bp, Homo sapiens
ggggccccagggcagagggtcaccatctcctgcactgggagcagctccgacatcggggcaggttatgaagtaccttggtatgatgtacactggtaccagcagcttccaggaaaagcccccaaactcctcatctatgctaatagcaaccggccctcaggggtccctgaccgattctctggctccaagtctggcacctcagcctccctggccatcactgggcttcaggctgaggatgaggctgattaatactgccagtcttatgacagcagcgtgagtggttcggtattcggcggagggaccaagctg

SEQ ID NO: 424 - DNA, 667 bp, Homo sapiens
tccctctacaattttttttattatggtaaaatacacaacataaaacttaccatcttaaccattttgaagtgcacggttcagtggtataaaataaattgatattgttgtgcaaccatcaccaccatccatatccacaagtcttcatcctgtttgtgattgcagcaaaaaagttaaccactgagggcaggcaaatcttcaggggatttagctggctcatcactatccgctcaaaattcagactctgaggatactgcaaaccttctttcaggtttccgctcaaaagctgcttgtgtctaaaaacaaaggtgtagaacacagcttggcaggctgagtaaaatggtccatggagagcaacatcgcagaatgcctttgttcccgaatcctggttattaaggtatatgtgcagccagttaaccaaaagatctaggcatggttttacagtaataagagaaataaatttagctcttgccaaaaagcttccaatataatttccagcagcctgcctgatgatggcaggattacttggatcctgcaagtttttccaaagatgttccaaaaatgcctctgcgaatcccatattaaacaatccttccgtggaatctgtcccaccacaagtttgatttgctgtttcttcagcatcttcaataccctgccgggatgcattcac

SEQ ID NO: 425 - DNA, 1104 bp, Homo sapiens; identical to SEQ ID NO: 280
  misc_feature (517)..(517): n is a, c, g, or t
  misc_feature (1019)..(1019): n is a, c, g, or t

SEQ ID NO: 426 - DNA, 6072 bp, Homo sapiens
ggtggtcggcggggaggcccccgcgctttaaaataatgcccgcggcgcccgcgcgaccatgcaatggcgagcgctcgtcctggggctggtgctcctccggcttggcctccatggagtattgtggctcgtcttcgggctggggcccagcatgggcttctaccagcgctttccgctcagcttcggcttccagcgtctgaggagccccgacggccccgcgtcgcccacctcggggcccgtgggccggcctgggggggtatccgggccgtcgtggctgcagccgccggggaccggggcagcgcagagcccgcgcaaggctccgcggcgtcctgggccggggatgtgcggcccagccaactggggctacgtgctgggcggccggggccgcggcccggacgagtacgagaagcgctacagcggcgccttccctccgcagctgcgtgcccagatgcgcgacctggcacggggcatgttcgtctttggctacgacaactacatggctcacgccttcccccaggacgagctcaaccccatccactgccgcggccgtgggcccgaccgcggggacccttcaaatctgaacatcaatgatgtactagggaactactcattgactcttgttgatgcattggatacacttgcaataatgggaaattcatccgagttccagaaagcagtcaagttagtgatcaacacagtttcatttgacaaagattccaccgtccaagtctttgaggccacgataagggtcctgggaagcctcctttctgctcacagaataataactgactccaagcagccctttggtgacatgacaattaaggactatgataatgagttgttatacatggcccatgacctggcggtgcggctcctccctgcttttgaaaacaccaagacagggattccatatcctcgggtgaatctaaagacaggagttcctcctgacaccaataatgagacatgcacagcgggagccggttccctcctggtggaatttgggattctgagtcgactcctgggggactccacatttgagtgggtggccagacgagcagtgaaagccctttggaacctccggagcaatgatacaggattactaggcaatgtcgtgaacattcagacgggccactgggttggaaagcagagtggcctgggtgccgggctggactccttctatgaatacctcttgaaatcttacattctctttggagaaaaagaagacctagaaatgtttaatgctgcatatcagagtattcagaactacttaagaagagggcgggaagcctgcaatgaaggagaaggagaccctccactctatgtcaacgtgaacatgttcagtgggcagctgatgaacacctggattgactctctgcaggcctttttccctggactgcaggtgctgataggagatgtggaagatgccatctgccttcatgccttctactatgccatatggaaacgatatggtgccctccctgagagatataactggcagctgcaggcccctgacgttctcttctacccactgagaccagagttagtggaatccacatatctcctctaccaggcaaccaagaatcccttctacctccatgtaggaatggatattctgcagagtctggaaaagtacacaaaagtcaagtgtgggtacgccacgctgcatcacgtcattgacaagtccacagaagaccggatggagagcttctttctcagtgagacctgtaaatatttgtatctgctgtttgatgaagacaatccagtacacaagtctggaaccagatacatgttcacaacagagggacacattgtatctgtggatgagcatcttcgggaattgccatggaaggaattcttctctgaagagggagggcaggaccaagggggaaagtctgtgcacaggccgaaacctcatgagttaaaagtcatcaactccagctccaactgcaatcgtgtacctgatgagaggaggtactccctgcccttaaagagcatctacatgcgacagattgaccagatggttggtttgatttgatctgctctctgtgaggcctcatcttgaaccagaccttaacgaccaaacccagaccatgccaaagtccagtctgaaatgaaaggggacagaagtcttgctgtccatggtggtgtaggaatttctgtgcaacacctcaccacgtctggttaatccttgcacacttcagtgtttctctcctgttcaataaaatgccctgttaaggatataatttgaagtgagaagatacatggaaattgccctcttatgacatgttgatgttataagcacaatagatggggcatctttggattgatgttcacagctttatacttcagaacctaagtctcttcactttgctggcacctgctatactggagtattgctatgtctttaaaaaatttttttttattatattttatttttttgagacagggtcttgatatttttttgggacagggttacctgggctcaagtgatccttctgcctcagcctcccgagtagctgggattacaggtgagcaccactgtacctggctagctacttctttgttagaggattgagaatgaaatttctgcaaaagggcccatggttcatttggtatccctatttaattgcattgaaaatgtcatcctttctgttgttagataattggggtcttcccctgatatccaaccgtgattttggatcacatgggagaaaaagtcatccagtttttcatgtttgcctcaagtaatctttacagtgttacaaattatttgcttaagaagaatggtcttaaccagaattcttaacagatagtctcttaggttattatgttatggtctaagaggttaactgacatcttttggatggtattttgcattttgaatatgaacttacctgaggaactcccatagttccagaatcaggtgccttttagggagagaacaatacctaagattgtctgagcttccatctttctcatatttcctaagcaaggattctcacttatgaccatatttgggttagagttctgttttgtttctgttttctgtgtctagtgccaattagctaaatcagggagaaagaaatgatcacatgacttttagcatccttgagccatttctctgtgtaatacaggctttagattagtgccttatattggttttggtttggggcactggatgtcgcagctactgctatggtttcaggaggcctgtttagccacatggtgagaccgtggtgaaagggggatggaaattgcttggccagtctttgcctttcatcctgtaaaagtaagcatgtagaaggaggaagttgtgctaaaatgcctttgtttttttgttattattttcttagccagaacatctctctttgaactcacactgatacacacctgctactcttacacagtgcagcagggctgactcttagtctggcttccatgaagcgtcatgggtggaaacgcattctagtaaaaaaggtaggaaatccctaaaacttccagcctcacatagcacggttctcacctgtcactgttttcccacctctaaggatttcatgtacatcttttcaaagctagaaataagcactgtctaagtttatgttgcatttttagtcaaaagggagaaatcttattccttcttgaaaattttaagtgttatggttttatatagttcagttctttgagatttttgaaaagagtattttcagtaataaacgtgccatctctatctcttaaacatttattacaacaattgttttaaaatagaaaaaataaaatgcttctattttaccttttttcatttcagaagcattattctgtttattaacagtgtcccatctactgaatagaaaactttgagaataatatatatatatattttaaatgttttcactgactcattgaaaatgttaattacacacacatgcatgcatgcacacacgagcatacttgtacctttgtctctgggcaaacaggtgggactgttagtgacccatttgggaaaatagagcatctcagagaaggaggtgagttcttcctgcctgtgatttctcttggcgctcccctcctctcccgctctggcttctgtggcggcagtggtgggtaagcactccagtgttctcttaatgaggcactttgcctgtcactcgagcaagcctgggtgttccttcctcctcatgctcctggaatagggaatagggatctcatgcttgcaaactacacaatgctgcaggtgcttcccaggggccacaggctgtcaggaaacgtgttttatgttaagtcacaaacccacttgacttctgggtactggaattaataccagtgggtgagactgagggtgagtgagttagtacatattaatcctggttgttgagcttccagactaccccgtccaaagtttgatgctatgtagtcagtggtttgtggggctggatgccagaaggttctttgagccagtttcaaaggttacttgtttttttttttttttttttaagtcagaatgttaacagctgtgatatatcctgcagggcttttgcagtttcttctgttctgtgttctgaaatcctgggtagagaatggctgaggaggagattaccagagaagttgctttgctcagtgctttgccccaggattgcctcaaatctgagtggacttcatcctttgcggcggctctgagcctggcccatcttcctattcccacgtgtagctagtgtctagtgtcagctttgctcaatgtggtggaaacattttgcagaactgttgtagaaagctgccttatagttggcttgacaaagcataattctctcataacaaactttcaaatcattacagtagcttagctactttagttgatgtgaccgaggaatcccttctagaatcataggtggcaagggagggtttgctagctctccatttgcactggccattgtgaaaaaccagcttctgtattcaaatctttccttcatttttttaaattttttttttggcagcgcttgtgctggaacttactcattgtaactgaatcctcagggcttttcttgttttagatcatggactgtgcacgtgacacttaaataattttctatgtatttaaagaaaaatgcaccaggatggtgtctgtgcacgtgactattagaggagcgtctgtagaagtacctggtttggtcagtgcagttgtgcaatctgagggccttgtttcctcctcccctttccccttctccccaccaaaggaaaatatccctcttaatgatttcgtagttcagtttactgaatgattaccacctgtaattcctctttggattgtgtagactcaacatgagacattcctttctgctttctggagggcaccaggggcctttctctttgataaattttttttgtctgttgacaaaaacaaaaatcttttttcaaatgtagtgctggtgaaaaggtagggctgagtgattaccttagccacagggtggctgagcaggaactttagaagaaaatcctgagctttcctgtccattcccagcatccagctcctattctagtgcctcttccctgcagggcagggaccccttgggaaatcgaggaggtgggacgggctgggccctgtgtcccaggtttcacagggctcagggttatgctcccgcttgaatctggacgtgaatctggtaaaaatatcaagtacctgtggaactccctgattctataccctcttccttctttctgcaaggcagaggaataatatttttaaaggttattttgttttagttttaaatagcaaaacacaagctgcatttttatttattttgcataagaaaggtaaatctttttacaaaaaaaagtatagagttggaaactctgggaaaacttacggaaatacacaaatgcttctctgtaatgtgcaatatgctttgcaactgtagatgatattttatgtttaatctgtaaataagaaatgtatttaaattaaaagggatctttttgtaaaaggaccaaatgttcttttataaatgtaataaggaatatcttgctctttaaaatttattaggatttttatgagtaatttttattaaaagatttctttttttg

SEQ ID NO: 427 - DNA, 6837 bp, Homo sapiens
ggcacgagcttctctcccagggcggtgcgacccggagctccagcgcccgagtctccacttcgtttgctgaaacttgctttctaccagctaagaaccatgctgcgagtgattgtggaatctgccagcaatatccctaaaacgaaatttggcaagccggatcctattgtttctgtcatttttaaggatgagaaaaagaaaacaaagaaagttgataatgaattgaaccctgtctggaatgagattttggagtttgacttgaggggtataccactggacttttcatcttcccttgggattattgtgaaagattttgagacaattggacaaaataaattaattggcacggcgactgtagccctgaaggacctgactggtgaccagagcagatccctgccgtacaagctgatctccctgctaaatgaaaaagggcaagatactggggccaccattgacttggtgatcggctatgatccgccttctgctccacatccaaatgacctgagcgggcccagcgtgccaggcatgggaggagatggggaagaagatgaaggtgatgaagacaggttggacaatgcagtcaggggccctgggcccaaggggccagttgggacggtgtcggaagctcagcttgctcggaggctcaccaaagtaaagaacagccggcggatgctgtcaaataagccacaggacttccagatccgcgtccgagtgattgagggccgacagttaagtggtaacaacataaggcctgtggtcaaagttcacgtctgtggccagacacaccgaacaagaatcaagagaggaaacaaccctttttttgatgagttgtttttctacaatgtcaacatgaccccttctgaattgatggatgagatcatcagcatccgggtttataattctcactctctgcgggcagattgtctgatgggggaatttaagattgatgttggatttgtttatgatgaacctggccatgctgtcatgagaaagtggcttcttctcaatgacccggaagataccagttcaggttctaaaggttatatgaaagtcagcatgtttgtcctgggaaccggagatgagcctcctcctgagagacgagatcgtgataatgacagtgatgatgtggagagtaatttgttactccctgctggcattgccctccggtgggtgaccttcttgctgaaaatctaccgagctgaggacatcccccagatggatgatgccttctcacagacagtaaaggaaatatttggaggcaatgcagataagaaaaatctcgtggatccttttgtagaagtttcctttgctggaaaaaaggtttgtacaaacataattgagaaaaatgcaaacccagagtggaatcaggtcgtcaatcttcagatcaagtttccttcagtgtgtgaaaaaataaaactaacaatatatgactgggaccgtcttactaaaaatgatgtagttggaacaacatatctacacctctctaaaattgctgcctctggtggggaagtggaagatttctcatcttcgggaactggggctgcatcatatacagtaaacacaggagaaacagaggtaggctttgttccaacgtttggaccttgttacctgaatctttatggaagccccagggagtacacgggattcccagacccctatgatgagctgaatactggaaagggggaaggagttgcctacagaggcaggatcttggttgaattagccacttttcttgagaagacaccaccagataaaaagcttgagcccatttcaaatgatgacctgctggttgttgagaaataccagcgaaggcggaagtacagcctgtctgccgtgtttcattcagccaccatgttgcaagatgttggtgaggccattcagtttgaagtcagcattgggaactatggcaacaagtttgacaccacctgtaagcctttggcatcaacaactcagtacagccgtgctgtatttgatggcaactactattattacttgccttgggcccacaccaagccagttgttaccctgacttcatactgggaggatattagtcatcgcctggatgcggtgaacactctcctagctatggcagaacggctgcaaacaaatatagaagctctaaaatcagggatacaaggtaaaattcctgcaaaccagctggctgaattgtggctgaagctgatagatgaagttatagaagacacgagatacacgttgcctctcacagaaggaaaagccaacgtcacagttctcgatactcagatccgaaagctgcggtccaggtctctctcccaaatacatgaggcggctgtgaggatgaggtcggaagccacagatgtgaagtccacactggcagaaattgaggactggcttgataaattaatgcagctgactgaagagccacagaacagcatgcctgacatcatcatctggatgatccggggagagaagagactggcctatgcacgaattcccgcacatcaggtcttgtactccaccagtggtgagaatgcatctggaaaatactgtgggaaaacccaaaccatctttctgaagtatccacaggagaaaaacaacgggccaaaggtgcctgtggagttgcgagtgaacatctggctaggcttaagtgctgtggagaagaagtttaacagcttcgcagaaggaactttcaccgtctttgctgaaatgtatgaaaatcaagctctcatgtttggaaaatggggtacttctggattagtaggacgtcataagttttctgatgtcacaggaaaaataaaactcaagagggaattttttctgcctccaaaaggctgggaatgggaaggagagtggatagttgatcctgaaagaagcttgctgactgaggcagatgcaggtcacacggagttcactgatgaagtctatcagaacgagagccgctaccccgggggcgactggaagccggccgaggacacctacacggatgcgaacggcgataaagcagcatcacccagcgagttgacttgtcctccaggttgggaatgggaagatgatgcatggtcttatgacataaatcgagcggtggatgagaaaggctgggaatatggaatcaccattcctcctgatcataagcccaaatcctgggttgcagcagagaaaatgtaccacactcatagacggcgaaggctggtccgaaaacgcaagaaagatttaacacagactgcttcaagcaccgcaagggccatggaggaattgcaagaccaagagggctgggaatatgcttctctaattggctggaaatttcactggaaacaacgtagttcagataccttccgccgcagacgctggaggagaaaaatggctccttcagaaacacatggtgcagctgccatctttaaacttgaaggtgcccttggggcagacactaccgaagatggggatgagaagagcctggagaaacagaagcacagtgccaccactgtgttcggagcaaacacccccattgtttcctgcaattttgacagagtctacatctaccatctgcgctgctatgtctatcaagccagaaacctcttggctttagataaggatagcttttcagatccatatgctcatatctgtttcctccatcggagcaaaaccactgagatcatccattcaaccctgaatcccacgtgggaccaaacaattatattcgatgaagttgaaatctatggggaaccccaaacagttctacagaatccacccaaagttatcatggaactttttgacaatgaccaagtgggcaaagatgaatttttaggacgaagcattttctctcctgtggtgaaactgaactcagaaatggacatcacacccaaacttctctggcacccagtaatgaatggagacaaagcctgcggggatgttcttgtaactgcagagctgattctgaggggcaaggatggctccaaccttcccattcttccccctcaaagggcgccaaatctatacatggtcccccaggggatcaggcctgtggtccagctcactgccattgagattctagcttggggcttaagaaatatgaaaaacttccagatggcttctatcacatcccccagtcttgttgtggagtgtggaggagaaagggtggaatcggtggtgatcaaaaaccttaagaagacacccaactttccaagttctgttctcttcatgaaagtgttcttgcccaaggaggaattgtacatgcccccactggtgatcaaggtcatcgaccacaggcagtttgggcggaagcctgtcgtcggccagtgcaccatcgagcgcctggaccgctttcgctgtgacccttatgcagggaaagaggacatcgtcccacagctcaaagcctcccttctgtctgccccaccatgccgggacatcgttatcgaaatggaagacaccaaaccattactggcttctaagctgacagaaaaggaggaagaaatcgtggactggtggagtaaattttatgcttcctcaggggaacatgaaaaatgcggacagtatattcagaaaggctattccaagctcaagatatataattgtgaactagaaaatgtagcagaatttgagggcctgacagacttctcagatacgttcaagttgtaccgaggcaagtcggatgaaaatgaagatccttctgtggttggagagtttaagggctcctttcggatctaccctctgccggatgaccccagcgtgccagcccctcccagacagtttcgggaattacctgacagcgtcccacaggaatgcacggttaggatttacattgttcgaggcttagagctccagccccaggacaacaatggcctgtgtgacccttacataaaaataacactgggcaaaaaagtcattgaagaccgagatcactacattcccaacactctcaacccagtctttggcaggatgtacgaactgagctgctacttacctcaagaaaaagacctgaaaatttctgtctatgattatgacacctttacccgggatgaaaaagtaggagaaacaattattgatctggaaaaccgattcctttcccgctttgggtcccactgcggcataccagaggagtactgtgtttctggagtcaatacctggcgagatcaactgagaccaacacagctgcttcaaaatgtcgccagattcaaaggcttcccacaacccatcctttccgaagatgggagtagaatcagatatggaggacgagactacagcttggatgaatttgaagccaacaaaatcctgcaccagcacctcggggcccctgaagagcggcttgctcttcacatcctcaggactcaggggctggtccctgagcacgtggaaacaaggactttgcacagcaccttccagcccaacatttcccagggaaaacttcagatgtgggtggatgttttccccaagagtttggggccaccaggccctcctttcaacatcacaccccggaaagccaagaaatactacctgcgtgtgatcatctggaacaccaaggacgttatcttggacgagaaaagcatcacaggagaggaaatgagtgacatctacgtcaaaggctggattcctggcaatgaagaaaacaaacagaaaacagatgtccattacagatctttggatggtgaagggaattttaactggcgatttgttttcccgtttgactaccttccagccgaacaactctgtatcgttgcgaaaaaagagcatttctggagtattgaccaaacggaatttcgaatcccacccaggctgatcattcagatatgggacaatgacaagttttctctggatgactacttgggtttcctagaacttgacttgcgtcacacgatcattcctgcaaaatcaccagagaaatgcaggttggacatgattccggacctcaaagccatgaacccccttaaagccaagacagcctccctctttgagcagaagtccatgaaaggatggtggccatgctacgcagagaaagatggcgcccgcgtaatggctgggaaagtggagatgacattggaaatcctcaacgagaaggaggccgacgagaggccagccgggaaggggcgggacgaacccaacatgaaccccaagctggacttaccaaatcgaccagaaacctccttcctctggttcaccaacccatgcaagaccatgaagttcatcgtgtggcgccgctttaagtgggtcatcatcggcttgctgttcctgcttatcctgctgctcttcgtggccgtgctcctctactctttgccgaactatttgtcaatgaagattgtaaagccaaatgtgtaacaaaggcaaaggcttcatttcaagagtcatccagcaatgagagaatcctgcctctgtagaccaacatccagtgtgattttgtgtctgagaccacaccccagtagcaggttacgccatgtcaccgagccccattgattcccagagggtcttagtcctggaaagtcaggccaacaagcaacgtttgcatcatgttatctcttaagtattaaaagttttattttctaaagtttaaatcatgtttttcaaaatatttttcaaggtggctggttccatttaaaaatcatctttttatatgtgtcttcggttctagacttcagcttttggaaattgctaaatagaattcaaaaatctctgcatcctgaggtgatatacttcatatttgtaatcaactgaaagagctgtgcattataaaatcagttagaatagttagaacaattcttatttatgcccacaaccattgctatattttgtatggatgtcataaaagtctatttaacctctgtaatgaaactaaataaaaatgtttcacctttaaaaaaaaaaaaaaaaaaaaaa

SEQ ID NO: 428 - DNA, 3224 bp, Homo sapiens
cgaggaccagcacctgaggccgggccgcaggccgacttcacagccaggcgcgcgcgtcgctgctgctgctgcggggctctggcgcgccagccggcgggacagcgggggctggcgggggccggggagcgccagatgatggatttggacatgcttctatgaagaaatgccacatggtccgagagcaaacatgtccaggctactcactttagtgactagggctcggtgccagcacttcccgggtaatcagacgtggtctgaccgaggatcaagaagcacatcatcaccaatgacatcatgacagcaagagagcacagccctcgccatggtgccagggcccgtgcaatgcagcgggcttccaccatcgacgtggcggccgacatgctgggcctctctctggcaggaaatatacaagacccagatgagcccattttagaatttagcttagcttgcagtgagctgcatactccatcgctagatcgaaagccaaatagttttgttgcggtgagtgtcaccacccctcctcaggcattctggacgaagcatgcacagacggagatcattgagggaaccaacaatcctatatttctaagcagtattgccttctttcaagactctcttatcaatcagatgacacaagtcaaactctccgtgtatgatgtcaaagatagatctcagggaacaatgtatttactgggctctggaacgttcattgtcaaagatctgctccaggacaggcatcataggttgcatttaacactaaggtctgcagagagtgaccgtgtaggtaacatcaccgtgattggctggcagatggaggagaagtcagaccaacggccccctgtgacccggtctgtggacactgtcaatgggaggatggttcttcctgtcgatgagagcttgacggaggcgttaggaatccgatccaaatacgcttcattgcgaaaggacactttgctgaaatcggtgttcggtggtgccatctgccgcatgtaccggtttccaaccactgatggtaaccatttgcggatcctggagcagatggcagagagcgtgctctccctgcacgtgccccggcagttcgtgaagctcctactagaggaagatgcagccagagtgtgtgagctggaggagctgggagagctgtccccttgctgggagagcctccggcgccaaattgtcacccagtaccagaccatcatcctcacataccaggagaacctgaccgacctccatcagtacagagggccctcgtttaaagcaagcagtttgaaagcagataaaaagttagaatttgttcccacaaacttgcacatacaaaggatgagagttcaagacgatggaggatcagatcagaactacgacatcgtcaccattggggcgccagcagcacactgccaaggttttaagtcaggaggtctccgcaaaaagctgcacaaatttgaagagaccaagaaacattttgaggagtgttgtacatcatctggctgccagtccataatctacataccccaggatgttgtcagagccaaggagatcatcgcccagatcaacaccctgaaaacccaagtgagttactacgcagagcggctgtcaagggcagccaaggacaggtctgccactggccttgagaggacactcgccatcttggcagacaagacacggcagctggtcacggtctgcgactgcaagctcctggccaactccatccatgggctgaacgctgcacggcctgactacattgcctccaaggcctctcccacttcgactgaggaggagcaggtgatgcttagaaatgaccaggacaccctcatggcccggtggacagggagaaacagccgatcttccctgcaggtggactggcacgaggaggagtgggagaaagtgtggctgaacgtggacaagagcctagagtgcatcattcagcgtgtggacaagctgctgcagaaggagcggctgcatggcgagggctgtgaggatgtcttcccctgtgcaggcagctgcaccagcaagaaagattgcagtccccctcctgaagagtccagcccaggtgaatggagtgaggccctttacccgctgctgaccactctcaccgactgcgtggccatgatgagtgacaaggccaagaaggccatggtattcctgctcatgcaggacagcgcgcccaccatagccacctacctgagcctgcagtaccgccgtgacgtggtcttctgccagacgctgaccgccctcatctgcggcttcatcattaagctgaggaactgcctgcatgacgacggcttcctgcgccagctctacaccatcgggctgctggcccagttcgagagcctgctgagcacctacggggaggagctggcaatgctggaggacatgagccttgggatcatggacttgaggaacgtgaccttcaaagtcactcaggccacttccagcgcctccgcagacatgctgcccgtcatcacaggaaatcgcgacgggtttaacgtgcgggtccctctgccgggcccgctgtttgacgccttgccccgggagatccagagtggcatgctgctgcgagtgcagcccgtcctcttcaacgtgggcatcaatgagcagcagacactggccgagaggtttggcgatacgtctttacaagaagtcatcaacgtggagagtttggtgcggttaaattcctactttgagcagtttaaggaagttttgcctgaggattgcctgcctcggtctcgcagtcagacgtgcctgccagagctgctgcggtttctgggtcagaacgtgcatgcccggaagaataagaacgtcgacattctctggcaagctgctgagatctgccgccgccttaatggggtccggttcaccagctgcaagagcgctaaggaccgtacagccatgtcggtgacactggagcagtgcctgatcctgcaacacgagcatggcatggccccgcaggtcttcacccaggccctggagtgcatgcgcagcattggaacacgggaggtagtcacccagaaaaacttgagcggcctggtgcccatccgagacttaaggctagaccccagcctcctctgttccatccctttattagctctgagccccaatttactgattgtgtggctctttctgagcatagcatacctggtgaccaaattgcgttgcaaatgaatatcattatgaaaaattaataagtcacaagaaaaacaaaagtgccagaagatgtccagccaccg

SEQ ID NO: 429 - DNA, 3224 bp, Homo sapiens; identical to SEQ ID NO: 428

SEQ ID NO: 430 - DNA, 5546 bp, Homo sapiens
ggatgaggagggggaaaccgggggaaaagagggaaaagagccgggagagaggtgggcaaggacgagggcgagggcacggccgggtcctggctggccaaacgaggctcgcggaagcagcagccgccgcctgaccgcagctggattttgaagattgatccaagggactgtattaatttcaggaattgatttgaaagacactggctctgccacttaacagccatgtaaccttggatatggaagaaagtagcagtgttgccatgttggtgccagatattggggaacaggaagctatactgactgctgaaagtatcatcagtccttcattggaaattgatgaacaaagaaaaactaaaccagatccattaatccatgttatccagaagttaagcaagatagtggaaaatgaaaagtcacaaaaatgtcttttaattgggaagaaacgcccacgttcaagtgctgcaacacactctcttgaaacccaagaactttgtgagattccggctaaagtaatccagtcacctgctgctgatactagaagggctgagatgtcacaaacaaattttacccctgacactcttgcccagaatgaagggaaggctatgtcttatcagtgtagcctttgtaagtttctatcatcatccttttccgtgttaaaagatcatattaagcaacatggtcagcaaaatgaagtgatactgatgtgctcagagtgccatattacatctagaagccaggaggaacttgaagcccacgtggtgaatgaccatgacaatgatgccaatatccacacccaatccaaagcccaacagtgcgtaagcccctccagctctttgtgtcggaaaaccacagaaagaaatgaaaccattccagatatcccagtaagtgtggacaatctacagactcatactgtccaaactgcatctgtggcagaaatgggtaggaggaaatggtatgcatacgaacagtacggcatgtatcgatgcttgttttgtagttatacttgtggccagcagagaatgttgaaaacacacgcttggaaacatgctggggaggttgattgctcctatccaatctttgaaaatgaaaatgaacccctaggcctgctggattcttcagcagctgctgcgcctggtggggtcgatgcagtcgtcattgctattggagagagtgaactgagtatccacaatgggccatcagtgcaagtgcagatttgcagctcagaacagttatcatcttcatctcctttagaacagagtgcagaaagaggagtacacctaagtcagtcagttaccctggaccccaatgaggaagaaatgctagaagtgatttctgatgcagaggagaatctgattcctgatagcctgcttacatcagcacagaaaatcatcagcagcagccccaataaaaaagggcatgttaacgtgatagtggagcgattgccaagtgctgaagaaaccctttcacagaagcgcttcctcatgaacactgaaatggaagaagggaaggacctgagcctgacagaagctcagattgggcgcgaaggaatggatgatgtttatcgtgctgataaatgtactgttgatattgggggattgatcataggctggagcagttcagagaaaaaagacgagttaatgaataaaggcctggctactgatgagaatgccccaccaggccggagaaggacaaattctgagtctcttcgattacactcattagctgcagaagcccttgtcacaatgcctataagagctgcagagttgacaagagccaacctggggcactatggagatataaaccttttagatccagatactagtcaaaggcaagtagatagtacattggcagcgtactcaaaaatgatgtcgccacttaaaaactcttcagatggattaactagtcttaaccaaagcaactccaccttggtagcactcccagagggtaggcaggaattgtcagatgggcaggttaagacaggcatcagcatgtccttactcaccgtcattgaaaaattgagagaaaggacagaccaaaacgcttcagacgatgacattttgaaagagttgcaggacaacgcccagtgccaacccaacagcgatacaagtttgtccggaaacaatgtggtggaatacatcccgaatgctgaacgaccctaccgttgccgcctgtgtcactacacaagtggcaacaagggctacatcaagcagcacttacgagtccatcgacagagacagccttatcagtgtcctatctgcgagcacatagcggacaacagcaaagatttggagagtcacatgatccaccactgtaagacaagaatataccagtgcaagcagtgtgaagaatccttccattataagagtcaattgaggaaccatgagagagaacagcacagtcttccagataccttgtcaatagcaacttctaatgagccaagaatttccagtgatacagctgatggaaaatgtgtccaggaaggtatctatgtattttgttatgcaggctgcagtgacttgcacatgacataaaagtgcccttagttgtcatggttggttattttcagggcaaaagcctatattctcctccatttttgtaccatggatgtgagtgaatctgatctctgtttctgaggaaatgccaagtactgaatgaagcagatgattactaggtcctaggtgagaagccctagatagtaaggattcatcttcagttgaaacttaagagccccttagaaggtgatgtaccagcaagccagaaaagcaagccagaaaagctacaacatggaaaacaggcctcccctccctctctcggcaccagttgacctactgagaacagagcttttgcagatggtaggcccccaccccaaactttaactggggctccccgctgtgatcttattcttacccaagtatgactgccagatttcatctgcattattaaaaaaaaaaaagcacacacacagacacacaagatctttttatgtactagttaagtagcagtcaaccgagtttctggtaataagaatattagaatcaaaagatttaattagagctccatgaaaaggcggatgccacatccggagaattaaggataaagtgtactaagctgtgccgctttggttcagctcacttaaattgatatactttaaatgtctccagtgtggcacataatgtttatgggagataagacatattggggtgactttcccttttagatttgctaagaattaaagttagaaacgactacagagtgaaatgttttaccataatgtttcattaaattataccccagaaagcataactgattctagaatgcttctgaaagaactgattttgacaccactgtagcaccaaaattctcatgtcaaacagatgtcatccctgtaaaactctctgaaacaaaaggagtttatgatatagcatctgtttttgcagtagatggctgagctaaaacagttttgtttcctttttacaaaatagccctaaatgcctccttttattttaattcattatgtttccatatcccctttaaaggagacattaaaacgtctgatatgattggaccataaatccctaatgaaaggatgaagtaaatactactcagtagcaccacctgcagttaatatcagtgttggaagatgtcttttttagcacggtcctaaaaagcaaacatttcaaactgtccaaatgagttaacattaaaattcacaattttaataaaaagattaaagtgtcagctcaaaattaaaataaccacttcagactttacagtattaatgaatgtttactagattttatgttgcagcatcttttctttgtggctcatgctttttttttagggttacatgcatggatttttaaattgcctgccatgcctcttttcctccacctggctccatttgcttttttctctcagtactgtagcagttcaaatggctgcatacttatacctggatgggtactttattaactcaatattagatattttgaaatctggttgtcaggccaaagaaaaaatttttagctcacaaataaggtaataataattcatgctttgttaaaacttctttacctatttagtaaacttgttaaacaagaagagagatttgtgcctctgtgatcctcagtctctgccattcagatagcacagataccttagggcatgtttcagcttaacatttgcttggccaaaaggcatggcctgcctgtcttgagctagatactgtgttaggtgctgggagtacagtgaaaggcatcactgcccttcaggaatccaactcagtgaagaagacagaacgaggctgatgggtatgtcagcagataccgcaggagctcaaatagagccgcaagcaaagccctttcgtatggtgttactccatgaaacctaattaaattgttttttattggaaacctataatttgccaagcgctggggattcagtctaaacaaaacaagcagatccttatcctcagggaatagacagcttagtggcagggcagagattttacccagacatgcaggtaaagtacagactttgctaaaggaaaaatataggacttattaaactatgctgtgaggttctagcatttccaatttgtagatgagaaaactgagacttcaagaggcaaaataatttacccatgatcatactggtagaaagtggcagagcgaggactaagcccaagtttttgaactttaaatccaatattctttccattggaaacagttgcttgaagtagcacaggctctcattctgtgctatattaagtttttccatctgtcagttttattagttgtcattgatctgtaatatttctcacacaaaaccattatccaatatttcacacttcattttttagggtttttttaaaactgtatttggaacagtgccatttataatcaagtccaagtttttaacctaccaattaagagcaatacttagattataattatgattagtgtgtatattaacgttatagatttataccaggaaattaggacattttgttctgcttggcagtagttattagcaaaagaaaatttcaattttagaaaccgtaaatttaacttaaggattttctttgttgaaatttcagtgtgggttttcctttgtataataccacggattttacttttatgcggtgtatacaggtgttctacctaagctttcttcctgccaagagacacacagttcttcctgctctgcctttttcatgagcttccatgcttgctttgtttctgaatataaagcagagtgtgaatagcctgtggactgtatgctgacagacaagtacatgaagcgttgaatatcttcaagaaatcgttttatatgatcaagtcactcaactcgtgttgacataagcttaccccaacttgaattactcagccctgttgttgcagagtgagtttagtaacatggctacttttcgttggatccatgtctcctgcgtttcggagagctgcatattcatgtcagtcataacctttgtccctgtaacctgtcagttaactagaaagaattatacattgcatagcacttaaaaattt

SEQ ID NO: 431 - DNA, 1242 bp, Homo sapiens
agtgacgtctttgccccgcgccgcgccgtcccacccatctccctggcctccggtcccaacttcgcttctctgctgaccctctctcgtcgccgctgccgccgccgcagctgccaaaatgtctacaggtccaactgctgccactggcagtaatcgaagacttcagcagacacaaaatcaagtagatgaggtggtggacataatgcgagttaacgtggacaaggttctggaaagagaccagaagctctctgagttagacgaccgtgcagacgcactgcaggcaggcgcttctcaatttgaaacgagcgcagccaagttgaagaggaaatattggtggaagaattgcgagatgtgggcaatcgggattactgttctggttatcttcatcatcatcatcatcgtgtgggttgtctcttcatgaagaaccagcggaactcaaaactgctgttcaagaaacctcttcaagacttttgacttagaacctgctatattatcaagcttacctactgttatctctaaaattttttttgtgttaatgtaaagttgaatttctaggaaacgtgcctttgttttttaatatgcactccaaattagaaggccggccccgtccacattttgcacagtgcctttacagatttacgtatgggctgatgaagaggccttcttaagttccagagtgctataatctagatgtaatgttgtcactaattaattgccattactcccagttagttacccttgtcatttggcattattttcagaaccacattttaaacctttgggtaatcagatttccaacttatgccttccagaaaaaaacactactgcctaacacaaatctgtgataacaacaggctgtgccttattttgataattttctgattccctagaagagaaccctctactttttgtaagcactactgactctcgctgtatttaagatgctggtgaagagcttttgctcttgcattagatttgaagatgtttacattgttgttattgttatgtatcacttgctaaaaatattgttttaatcagagataacctctttaaaaaaatttttaaagaactatggctatgaccaaagcttctattttgccaaaaagttaaataccgataaaatggccttaagtgtattcctgacagttaaattcagaaacgtgccaaatggaactcaaggtgccccttcagaattaaaatcattaccttgtgagtaaaaaaaaaaaaaaaaaaaaaaaaaaaaaa
